United States Patent Application Publication US 2026/0108570 A1 - sequence listing, part 2

SEQ ID NO: 26 - DNA, 177037 bp, unidentified
  source 1..177037: mol_type = genomic DNA
aaaaatgggtaacgcctaagtacggttcgccacgtaacgatctgcgatacaaaaatatcaaaggcgataaaaaagatagtatcgcttgcattaaaattagaaatgattatattgtgacgaaggttgaaggtgaacgcgccccagcggtaaaatcctctgagttagaggcatggctggaggcagacgatccgacaacattgatgacccctgaatgggccgcacgttacaaagaaaatgaggaactacgcgatttcgaatttataccaaaagatattgaaaattcgattattgaagcgtataatactccaaaatccggaagtaaagccaaaatggaacgttacttcatggataacaaactttcccgtatgttcgaaaaactgagtgatttttgaggtaacaaaatgagtgtagaatttttacaaacaaaccctgatgtagcaaaacaggtaaaagaactgatcaaagaagcatccaacgtgaaaactcaagttgagatcttcaacggtacgttcaaggatatcaaatccaaagcaaaaactgatttcggtatcgatggaaaaaccttcgggaaactgttcaaactgtatcacgaacaggcccgtaccgctttcgaagaagaaaacaacgaactgatcgaactgtatgatatgatcgataaggcgtaaagcatgatcggaaataagaccgaagtcggtttgtatatcgaaaatctggttgcctctgagggggcaacctacatggaagcaacgctacaatggatggatgaaaattctattgattatgcgatgctgaataaaacggttcctcgcgcgatccttgataagattagcgacgaagcgatcaaaggaaacatgcttcgcccatcggttgcgcttgaacatagttcatcaaccactctggacggcttcatgtgagattcaaagctccgtttgctgatagcgaggcgaattcacggcttgtgcctttgtctgtatacaagttatatctggcgatgaaaactcatttccaggggcgttttgatgtccttcaatacaactggcagatcaaagttagtgaaaacgcctttaacaagcgaaaggatagatatttctttgtaaaattagctcaacgctttacattcaaagaaatctattttatattcctctccaacttcgtagccaatccggatttctgggtaggcgatgttgatgaagatagtattgtcttttacaggcagtacataggaaagttacaaagactagataacgtgtttgtggatgacgttaaaaacgtgtacgaattcgccaaaatgaaagagatccccgtgtctctggtgttcaagtacagcgaaaaatcatcaacgtcctacataagcaaacttgtcctgtcaaatgtgatatcttacgaatcgtttttgatttttgactcatttttaggtatcataaataaacacgatcaagtagctgatgatattatttggtctgactttagcattaagttaaaggcatacagaaaaatatttgaccttactgaaaaagatatcataaaatatcgaaacttaatgaaacaaacgttaatcaaactaaactaaacgagaaaacagaatatgagcagcatttttaaacgtcaagatcccgctaaactccaggcacaggtagcaaatctgaaaggtggttccggcttccagaaagatgagaaagaatggaaactgaccctggacgcacagaaaaacggttccgccgttattcgattcctcccagcacgttccgatgatgaactggcgttcgtccgtatcgtgagccactctttcaagaaaaacaaccagtggtacattgagaactgttcctctacccacggcgattatgacggctgtcctgcatgtaagtacatttccgaaaacgatctgtatgagaaggctaaagccaacaaaaacgggccagaagataagctactgagccagatcggtcgtaaacaaagtttctgggctaacgtcctggtcgttaaagacccaggcgctccagaaaacgaaggtaaggtgttcaaataccgcttcggtaagaaaatcatggacaagatcaccgccgcaattaacggtaatccagaacttgatgaaccgggtattgctgtaacctgtccgtttgatggtgctaacttcaccctgaaagcgaaaaaagttggtgattggcctaactatgacgatagctcgtttggtgttccggctaagatcaaaaacatcgacgatgaagaagttcagaaagcaattttcgaaggtatgagcgatctccgcccgattaccgctgaaagcgaatttaaaccgctggctgacctgaccactcgcttcaataaagttatgggtagttcgatcggttctgctggttccagcgcttccgctgaccttgatagcgaactgagcaacttcgataacgaaatggctaagtttgacaatcagacatctgatgtgaaatcatctggtggtgttgcatcggttccggtaggcgaagatgacggcgtaccgttcgacctggatgattctgatacctccggtgatgacgacctggataaactgttagacatgtaatacaagcgggggcttcggcccccactcaaagaattctaagttagagaagaaatatatgaatgaaagtaatgtttttgttgactacatgaaccgcgtccgtaaatcctgggttgctaaactctcggacgaaacaaaagaactgtttaaggctatgcctcaagaggaacgttttaaacactatcgtgacattgatgaaaaagtggttgcggaacatcgtaaacttaccagcgaacgacgcgaagatccgaagcgtacaaccgttaaagaaatggctgatatgcttgacacagcagcggaaaccgttgtaaaatcacttattaagtaacacttattgaaaactaaaggctgaatatgaaattctctaaacaaactattgatatcctgaaaaacttttctcaaatcaactcttcgatcatgctgaccaaaggttcattcatcatgacgaaatcaatcaacagcgttgtatacgcagaagctgaaattgctgatgtgattgatgaagatgttggtatctacgatctcaactcattcctgaacatgctgaacatcgtcggcactgacgcggaaatcactcatgatatttcaactggtgaaatcgtgattcgcggcgacaagatgaagatcatcgaacgttcagcagacgcaacaacgatcccgaaaccgaaaaaacgtctggtgatgccagtagcagatctgattttccagattacctctaacgatttcgaaaaactgatcaaagcgtctcgcatgatgaaactgaccgacctgtccgttgaaccgattgatggtaaactggtcatcaccgcgaaaagcaaagaaagtcaatcaactttctccgttgaagtcggtgagtatgaaggcgacaatgttttcaattttgatatgaagattgataacatgcagttcatcaacagcgattacaaagtagagatttcctccaaaggggccgcaaaattctcttctgataacggcgttgcttacgtcgtcgtacttgaagcaagtagcacattcaagtaagatagttttaaggggctacggcccctttcttttacaccatttattttgaaggtatattatggaacttagtgaaaatattgaaatcatcgaaaccaaatacggtaaaatctctcgatctcctgatgaatttgcatgggatcagcgctatcgcccaacaacgattgaagagtgtattttaccttctggtgacaaagccgctatgcggggcataatcaaatctgggcgtgttgagaacatgacccttgtatctgattcccctggcactggtaaaacgaccctcgcgcttgtgttggcccgtgaggttgatgctgaggtgttctttgtcaacggttcgaactgtggtgtaaacttcattcgtaatgaactggatcgttttgcttcatcaatgacgcagaaaccaggcggaaagattatcatcattgatgaattcgatcgttctggtatggcggaagcacagaaacacttgcgtagctttatcgaagcatacagtaaaaacgtttctgttattgtaacagcgaacaacattaacggtgtgcatagtgctctgctttctcgttgtcctcctgttaaattcggtgttccgtctgatgctgaacgtatcgaactgatgaaacagttaatcaagcgttgtttcggtatccttgaaatcgagaatatcaagtatgatcctaaagtcattgcagcgtttgttaaagagcattatccggatgcgcgttctattatcaaagcgattgggttctactcgaaacgtggtgaaattgatgcggggatcctaaatgagatcgttggttctgatgtgtctcatatcattaccctgttgaaagaaaagaactataaagggttgcgctctgaggttattaaatatgcgtcagaatacgatacctttatcggaaaattgactgatacgatttatcctatcgtgaatcaggattctaaaatcgcactgattcagattgtaggcgaaaacaacgcgcaatacgggctggcgatgaataaagaaattcatctgcaatatctgttgatgaacctgatgctttctatggtctgggaggcgtaatcatgagcctggcggaatttctggatgaagaagagttatccccgcatgaatccgcttggctttctaaagattgggataaggttgaagaactggtcaaagagtacggcaaggataaagaaaacaccttgtttaacatcatagacgaaatcaacaacggcaaaacgccgttggttatcgatgaagtgtatgataagtactttgtagacaacgcaatgagccagcacatagacacgatatacaacgcgtatgtgatgaatctggtaggcggtagtatctctgaccaaatgcactataactattatctcaactctgttaggaaggctaaacgcttcggtgcatgggctaaactatcggaagattttgaagagaaaattattatcgaaatccttcgcgaaaaatacagtgtaaatacacgtacagcgatggaatatttgcaggaacttaaagacctcggaatgttcgaggattggaaaagaaaacacgcaaaggtcgctctgtctttgttgggtattgtgaaaaacaaagctgaacaaaagaaattggaaaaattgattaaacaatggtgatgtatgttagaaattcaactaatcagcgacgattcttttttaaagatccgtgaaacgctaacccgtattggtattgcaaacaacaaaaagaaaatgctctggcaatcgtgccacattctgaaaaagcaaggtaagtattttatcgtgcattttaaagaactgttgaaactcgatggtcgtcaagtcgatatgacggaagaagacgaactacgccggaacaacattgcgcgacttctcgaagagtggggcatggttaagatcgtaacccctgggttgaagtttgcagaagaaaacaacttccgcgtactgactcactcgcaaaaagcagattggatcctcaagtacaagtaccggatcggtcactaatcaaaaagcccttgcattcgtgcaggggctttgttatattgggtgtacaccattgagagggatatattatgactattaacgaaatcatggattcaatcaaatccaacgaaactttgatcatcccgattgtaaaagatgacatcttgttatcgttaacttgcaatctgtcagatacccgcacttacagctatgcacaacactactttcctggattttacgatcgtaacatttcagagtacacattgttatgcaatcaagttgaaaccactcatttctatgagcgtattaaaaaatctctggaattgatccaacaagcaaaagaagtctttatgaaaagaatggaggacgcgcaatgatccgcacttacatgaataaaattttcgcggcccgtatggataacgttattgaccaacgtgcttatgatgatctggtttcccttgcaacctgtcaactggatgaacatacagtaacggaaaggaaactactggttaacaaagctatcatgatggttaaccagggaattgcagaagcaaaatatcatagtataaattccagtatttttagcatgttattcgacgggtttaaacttgaacgccagcttgttcaactgagaaagatccgtgacttgttagcagaagggttgttggttttagaacatcgagtaaacttgaatttgctgtaggtagtgttacaatggaacattatattaatggagaagacaagatccaatgaatgaattttacctatcagttgaacaaatgggagataccatttacgagcgcttcgttgactctaacggcaccgaacaggtacgtaagacgaaatatgcgcccgtaatgtatcaacacgctatgaatggcgtagaaaccccatacaaagacatttacggcaagccttgcctcaaaaaacagtttgacagcatcaaagaagctaaaaactggatgcagcgtatgcgcgatgttgggatggaagcgctaggtatggacgattaccgactggcttacatttctgacatgtaccggaatgaaatcgaatacaaccgcgaacacattcgcattgcttctatcgatatcgaggtgaccgctccagaatttccggatccgcgtgaagcaaaatatccaatcgatgcgatcacccattacgatagcattgaagataaattctatgtatacgatctggttgagggtggccttgcggaatggtgcgcggaaaacgttgatcgcaaagacattagcgaagaagatttaaacaaaattgtttatcggtctttccagaccgagaagtcgttattgtctgcgtatatcaaagattggaaagagcgaacccctgttattgtaaccggatggaactctgacaaattcgatattgcatatatcatcacgcgatacctgaacattttcggtcaaaacgtggtaaggcattttagcccgtttggtaaagtaaccgccagaaccactactgacgcttacggcaacgaacaattaggatatgatattttcggcgttgctcaaatggatggtatggcgctgtataagaaattcagctttaccccgcaaccgtcttaccgtctggacgcgatcgcggaatacgaaactggtaaaaataaagttgagtatgaaggttccctgtctgaactacgccagcgcgatcaccaactgtacatcacgtacaacattgttgacgttatccgcgtacttgatatcgacggtaaacgaaactttattgaactggttctgtctgtagcgtactatgcaaaaattaacttcccaggggttatgtctccgctgaaaacgtgggacgcgatcatttataactctctgcgtgaagataaggttgttattccggaaaacagacgccatactaaaaccccttaccctggggcatttgtgaaggatccagttcctgggccttacaaatacatggtatcgtttgacttaacaagcctgtacccttccatcatccgacaggtgaatatcagccctgaaacgattatgggaagttttgcggtacgtgctcttgaagagtatattaataagaccgcgccgcgccctagcgatgaatttagctgttctcctaacgggtggatgttccgccgtgatatcaaaggcgtgatcccagtagagatcaagaaagtatttgatcagcgtaagatgtggaaaaaacgaatgatggcgggtgagcgaaatcttgaactcatcaagcacgaactcgaacacttaacagacgcgcataaccaaatggttgatcctgactttgatttctatacagatttcagtgatgaatcgaaagcagttctgaaaactcttacaaaacaaatgcttaaagcagttaagcgcgtgtgtgagaagaagatcgcacaagctaacaccgcacagcttaaccgtaagatttctatcaactccctttatggtgcgttgggtaatgaacacttccgatacttcgatctacgaaacgccagcgcgatcaccatgttcgggcagttggctatccagtggattgaacgtaaggtaaacgaataccttaacgacctgtgcggtactacggatcatgcatatgttcggtactgtgacactgactccatttatgtttgcatggataacgtgattgcaaaagttggtggtgaggctaaatttaaggataataaccattgggttgacttcctggatcgctttgctaaagaaagaatggaaccgatgatcgataaagggtatcgtgaactttgcgaatacatgaacaacgtggaacacctgatgtttatggatcgtgaaatcatttctgggcctccgttgggttccgaagggttgggaagtttctggactgctaaaaaacgatatgcggctaacgtgtgggactccgaaggaacccgctatgaaaaaccgaaactgaaaatcatgggtatggaaacacagcgatcgagtactccgacctctgtgaaagtattcctgaaagaagcgatccgccgtatcctgcaagaaggtgaattatctttgcacgaacattataaaaagttcgaagaagaatataaggaacttgactacagggaaattgctggtgtatcatctgctaacaacatttcgaaatatcgtgatggggctggctatccaatcaagggaacaccaaaccatattaaaggggtgctgttctttaaccgtttcactgctggtattgatggtgttacgccaatcatggaaggtgaaaaggtaatggttctaccactaagggataaaaacccgtggcaagccgattgcatcgcgtggcaatccggaaataaactaccgtcagagatcgaaagtgatattctggcatgggtagattatccgggtatgtttgaaaaacatgttattagtccattgactaatatcacggaagtatgtaaaattgattatgaaaaacgtgccagtttaaacgacctgttcggtgactggtaaactctaggggcttcggcccctttcattaactagtgagatatatagaatgagaatgaataaatcggaaaaattaaatgtcaaacaaagcactactaaaaaaactgatcaaaaactcgaatagccaaactgcatctgtactttctgaaagcgacgtattcaacaatattaccatcacgcgaacccgtgtgccgattctgaatctggcgttgtccggtgcgtttaacggtggcctaacttctggtcttacccttttcgctggcccgtccaaacacttcaaatccaacttaggtttgctgactgtagcggcttatctcaaaacgtatgaagatgctgtgtgcctgttctacgattcagaaaaaggtgttactaaatcctatctgaaatcaatgggtgttgatccggatcgtgttgtgtatactcgtatcacgacggtcgagcagttgcgtaatgacgttgtaagccagcttaacgcgcttgaacgcggtgataaggtgattgtattcgttgactcagtaggcaacacggcaagtaaaaaagaacttgctgacgcgctgtctgataacgataaacaggatatgacgcgagcaaaagcattaaaaggtatgttccgtatggttacgccttatctggctgacctggatatcccgatggtttgtatctgtcatacctatgacacacaagaaatgtacagcaagaaagttatttccggtggtactggtttaatgtattccgctgatactgcgatcatcctgggtaaacaacaggtgaaagaaggtactgaggtagtgggttatgatttcatcatgaacatcgaaaaatctcgattcgtgaaagagaaatcaaaattcccgctgcatgttacctatgaaggcggtattagtatgtattctggccttctggatctggcaatggaaatgaactttgtacagaccgtaaccaaaggctggcgcaaccgtgctttcctgaataccgagactggcgaactcgaagttgaagaaaagaaatggcgtgagtcagaaacaaatagcgttgaattctggcgtcctctgtttactcatcaaccattcttgaaagctatcgaagaaaagtataagatccctgatcgtgaaatcagtgatggttccgcgctggaagatttatacagcactgatagcatcccagatcctgatctggatgatgacgatatcccagaatcatttgatgatatcgaagaagacaacgaaattttataaaaactatggggcttcggccccataaccgaggcaatgtatggatatcgagagcaaagcaaagaattatattgatgaagcgatgaaagatgttattcaggaacttctgattaacgatgaaaaaggtgttgcgcatctggtttatattcataaggtgttttgggatcatggtctgaaagtagaattcagtaccccagacgaagacaaagaagcgttgatcccgctggtgcatgatgcaatttatgcacagattaaagagcttgaaaagggttcagttgtcccaaagcctaagctgacattatgggatgtattcaaacaaaaggtttacaactttttcatgatgttcagcaacctggtataaggcaatacaatgatcgttgatacaatattttctaacctgatttataacgggacgtattttgtccaagcatggcctcatctgaaaaaggaatattttgaaggcaatgcacaagttttgtttgacctcattgataaacatgtacaggaattcaacggtattccgtcaaaaactgctttagaggttgcgcttgacaaacgaaatctaagtgatgtagtctacgaagacacgaaaaaggcgattcagtcgctgaaaaatgcgccagaagatttagattggctaatgaaggaaacggaaacatattgcaaagacaaagcaatgtatcgtgctctttctcgcgcaatcgagatccaggctaacgcagaaaaaccactggcagaacagaacaagaaacttcctggtgttggggctatccctgaaatcatggaggaagcattagcaatttcattcgatagttcagtaggtcatgactatttcgaagattatgaaaaacggtggatgctttaccaatcgaaggcgatgaaaattccgtttggtatcccgatcctgaacgcaatcaccaaaggcggcgcggaacgtggtacactgaatatcatcatggctggtgttaacgttggtaaatcactgggcttatgttctcttgcggctgattatctgcaacagggtaaaaacgttctttacatttctatggaaatggcagagcatgtttgctctaagcgtatcgatgctaaccttcttgatgtgactatggatgacatcgacgaagggaacattacatacgcagactataagaacaaaatggagcgccttaaagcgggtaaggttgggcgtttggtggtcaagcagtaccctacatcgggtgcaggtgcaaaccactttagagcgcttgtgaaagagcttaaattgaagaaacagtttgtgccggatgtgatcattgtcgattacctggggatctgtacttcaacccgcgttaaaggtgctgaaaatacctatattctggttaaagcaattgccgaagaactacgcggtcttgctgttgaaactaataccgtaatgtggacaggcgcacaggttgggcgttctgcatgggatagttcggatgtgagtatgggtgatgttgcggaatccgctggtttacctgctacggctgattttatgttagctgtaatcgagacggaagagttagctgatcagggtatgcaactgttcaagcaaatcaaatcccgttatggcgataagaacactttcaacaagttcaagttggaagttcgaaaaggtaatcagcgctggatggataccgacaacagcgaatacgggtttaaatctgactaccacggcaacactatgcctaaaacagtagaacagacacaaggcccgatgattaaacaggctgaatctacccgacgtgaaaaaatggcacagattgcaaaatctgacattcaattttaattgactggggcgaatagccccataaagaatgtaaggtaatgaaatgactaagactataacgattccgattccggctatcaaacttctgactggactgacactgatttttgcagcggctaaagtatttggcttctcgcatatgtcatggttctgggttctcttcccagttctatcacccgtctacattgtagtaggcgttgtgttggtgggtgttgcgatctatctgctgttctcactgattgccagtgacaaggccgaagatatgtatcgctgggtaaaagccaaatacgaaaaatttttcaaaaaatcgtaaaaaggtattgacctgaatctccattgtggtaatataactcacgtagacaagatactgagttaaacaaaggagattcaaaatgaacgtattcaacaacccttacaacgaaatgctgaacccgaatgttgatttcagcgatggttattttgacgcaatcgtaaacagcatcaaaaacaaaggtttactgttagcgatgctggaaaaaggcaaagatgacgttgaaggaagtgttgatttcctctggaacttcctccctatcgaacctggtttcaaagttggttgtaatgaggaacaagcgaaaaacgttcttcggtatctcatcaataacgcataaaaattaagccccgaaaggggctttttgtatctgtaggtattgcattctttcgcaaaagatgataccttaatcataacaaaggaggacattatgaaaatcgcattcgttatcactttcttacttgcagcactcaacatcgtaactggtaattcttttagttggtgggtggtggcaatgccttacattttcgtgtatagcaaaatcatggtgattgctggtgtgaatcttgtccttgctatcttactatttgtattcgccgccctgaatggtgaagcaggttctacctggaaagccatgaaagagggtgttaaagagggtttgaaatgataaatttagatttttgtaaggcagaaatgcaagctgacgcagacgaagaagaaccgaagttcgatagtcctcacagttcgcgctggatcgtagctgttgacgatgaaggttatgttacggtattatctcgaccattcattcatgatgcattctttgaatgtggacgcagcgcggaagatatcgggcttcctgattctgtcgaaatgcctcctggtgtatatgaatggatctgtggttttgaacaaactactgactgggaaaccggatatgtagacggatgggaattctaccctaacgaatcaacattattgtatagctgggaaaatggcaaagttaacgaaagcggaaaccaagaaacacaatcagataatggatctggttcactctgacaaagcgctaacttacgaagagaagttgttcattattgaaaactttcatgaaggcgcgtttacaaacaattctgaattaggggcgttctttacccctattggacttgctcgcgatttcacaatcgatgcttgcacaggtggaagtgttattgacctgtgtgctggtatcggtgggttatctttcgctatggttcattacatgatgtacaatacgccgcgtgaaatcgtctgtgttgagttaaatcacacatactatgagttaggtaagcgtatcgtaccagaagcctcctgggtgcatggagacgccttaacaactgaatttaatcaggtgtttgatatggcgatcagtaatccgccttttggtaaaatcaaaacatctgattttaagggtaagtatacaggggcagaatttgagtataaagtaatcgaacgtgcatcacagatcgcgcgtcagggaactttcataatccctcaaatgtctgcaaatttccggtattcgaaaacacactgtttccgacaagatgacagcaccacatcaagtaaatgcaaaaagtttcttgatgaaactggcctcgttatgaatcctggatgcggtatagatactgggtattacctggaggattggaaaggggttaaaccactatgcgaggttgtttgtatggagtttgaacctgaaaccaaatctgatttattcactttcacaatagagtaataatcatgagtgatcaattagttaaaaatatggatttaacatatagcgtccggatgatccggctactcaaaaagccctggactgaatggactgcttacaagctggggatccttgatggacaaggcgaagtaattcgcaaccccaaaacaaaagaagagttagaagcgtattctccttttcatcgttcagtacgccatatcaagcgtagaatgaatgctgttccgtatatgagtgggtttatgaacttaaccagttcatatgataccctacgcaatcgctacaatctgacagaacaagagcatgaagaaatcatgttgaacgttccacgcctcaaagaatattatgataaggggcgcatgttagaggatatggtcgcgggtgattctggcggcgatacagaaaagattgcttctggtgtgactactggagcagtaaccaacatcgggccgaaagtattaggcgttacccgtgcagggaaaaggaaaaagaaatgataattcctccgctgaatatcactatctgggctactgctaacgattatacatggtttccaatttgtatcatgtatatgagtgacaacgcgaccgtttatcagaatcgtcgaaaaggttctgataaaattgatattgcaataaattattcgtttaaacaggcatttcgtggttggaagttaatgcttgacggaacagaaaagcaagtaagttcttgacagaaaaatcctcttagtctatgatattgaaatcatttgattaggaggatttacaatggcggttggatttggccctgctgacggtgttcaagataccatccaggcaacaatagacaatgcgatagattttgcacgttctcaaatcagaaacggagaatcattaacgcattgttttgattgtggggatccgatacccgaaaaacgtagggctatcgtgaagggttgccgttattgtattgaatgccaaaaagaacatgacgaaatgatcagcgcggggtataatcgacgaggatctaaagatagtcaactgaggtaagaaatgtatcttgatatagaatttgcaacccgaatcatgggatcactgcctcaaagcgaaatcgttcgtaaatcgggggcattaagcatcaatgcgcgttgtcctatttgcggcgactcaatgaaagacaagtacaaaaaaagattttggatctacccttctaaaaagggtgatcatatgaattgtggttgttttaactgtggttatggtgtaccgtttagcgtattcctgaaagaatattatccagacgattaccgtgattatctcatggaatcgtttaaggatcgcaattcgttaaagccaacgcatacagaacaaccgaaggaagagaagaaatttattcctactcttcaattctgcgaaaggttagataccttgccggatgaacatccgatcataaaatatgtgcagaatcgttgtatcccccgtgacaagtgggatcggttgtggtttactcgcgaatggcaacaactggttaatactgtgaatccggatacctatccgattgcaaaaccagaaccgagattagtgatccctatcttcgataagaaaggtaaaattgaatctttccagggccgtgctttacgtgatggtgctaagtcgaaatatatcacaatcaaagcctgtgaggaatcaactaagatttacggacaggatacgatagatccgctaaaaacggtttatcttcttgaggggccattagatagcctgtttgttgataatgctggcgctatcactggtggacagcttgcactttctgaggttccgtataaaaatatgcgtgtctgggttcttgacaatgaagcacgtcatccggatactactcaccgcctctttaaattgattgaggctggagaaaaggttgtaatgtgggacaaatgcccgtggccttccaaagatatcaacgaaatgataaaaacggacggcgcaactaaacttgaaattatgcagtatttgaaagataatactgtttctggactcacggcaaaacttcgatttaagtcgtgggacaaatcaccgaaaaaatgagattgatatgactactgataaaactcctgtatttaattcatgtgcgcacctggttaacccggaagatctggaatttgtagattccgaatatcaaaaggttctggcccgtaatggcgatcctttacaatccatgctggatttacaaaaccatgcacaacaaagcctgtctgataccctgcattgggttccgcgtccggataatctggaaacttgcggagaaatccttgattggctgaaactgcaagatgacgcgatcgccgatgaaacccgcgaattgtataccgctctgggtggaatgtctcgcggtgttaaacctgcgtccggtgtttggaaaccgtggaaagcaaatcaccaggaattgcgcaatactaaatttgcggatctgagtgaagaggatcgtttagaagttctgtttgaaatgatcgaccaattccactttgtactatgtaagtttattgcattaggtatggatgcggaaaccatctacaaactgtacgctcttaaacaagctgaaaatcttcgtcgttgggccaacagctattgattattagcccactcaagccaatcggtatcttcgtaagggttccatccctttttgaatagctcgattgatgttctaggaacacgggagattgttgcaatttgcaattcttgtagcattctcttgtgtccttgtcttttataaattccagctttaatatcgttaatataccagtcatagaaaatcccagcataccgccattcatgctttcctttcattgttatttgatttctccagggtttttgaccataagcaggatgattattaccgcgtaacccatacatagagtttttgtctcccttatgggattctgacatctttttgcgttgttcttctgttgcctttgtccctgttctgtcttttgacaactgagatacccactttctacggatccatccatatgctttattatttctctgtgttgcattgacgcacatcatattggcagcatatatcaatttattatcgtgcggatacatcttgacaagaagttgatgggctacataatgttcttctgcggtaagttctactaaattgtcatgttcgtcactacctcccatacatcggggaatgatatgatgcttttctgtataacaatctagtgttcttcctcttgctttttctataagattggtgtaaattttacggtagtccattgatagtgttccttagtagttgttttgttgctggggtgatccatccgataggatgtctatttttcattagttgaactatctgttcgataggaaaagtgtatttgaatgtgtagatatctccttcaaatacgggggttgttgtataatgagcatgaacaactattgtgtttacggtcgatatcatgtataatctcctttattatatttatggtatcgatcaatggcactttttgatgctagtagctgttggggttctttcttatggtgtttgcgcgatgatcacatatcttttcggttggtgtgtgtttcacgtaaatggcgttgaaagaaaacttttactgattatactatcagtgttttggtttgttggaatattctacgtttgttatgaggggcgagaatgattacaaaatattatatcgtcgttagtaaggataaagacgggtttaaaattcccttcattaaggaaggagagttaacacctttgttgtttctatctccggacgatgctaacgagtataaaaattcgattatcaaagaatatcatgataagatgaatccagttaaacaaagtggtcttagccgattctttcgaaaggaagaagttgaaaccgtaaccgaaaagaaaaagaaagatatgcgttggtttattgaacacgcaagtattcaaggggtattgattaaagtatgagcgaattaacttttgacgatctgagcgaagaccagaaaaatgcacatgatcgagtgattaaaaatatcagaaacaaaatccatactactatcacaggtgggccgggtgttggtaaaactactctggtaaaatttgtgtttgaaacattgaaaaaactgggtattagtgggatctggctgacagcgccgacacaccaggctaaaaacgttctctctgaggcggtaggtatggatgcaacgaccattcactcagcactgaaaatcagccccgtaaccaacgaagagttacgagtatttgaacagcaaaaaggcaaaaaggccgctgatctgtctgaatgtcgtgtgtttgtggttgaagaagtatcgatggttgacaaagaactattccgtatcatcaagcgtactattccgagttgtgcggtgatcctgggattgggtgataaggatcagatccgtcctgttaataccgaagggatcaccgagctttcaccgttctttgatgaggaaatttttgatgtcattcgcatggataagattatgcgtcaggcagaaggaaacccaatcatccaggtatcacgcgctatacgcgacggtaagccgttaatgcccctcatgaatggtgaactaggggtaatgaagcacgaaaacgctggtgacttcctgagacgttattttagccgtgttaagactccggatgacctgaacaataatcgtatgtttgcttacactaacgcaaacgtagacaagttaaacacagtgatccgtaaacacttgtacaaaactgatcagccgttcattgttggtgaagtggttgtgatgcaagaaccgttagtgacagaaggccgtgtgaatggggtttcgtttgttgaagttatctataacaacaacgagcaaattaaaattcttgaaatcataccgcgttctgatactatcaaagctgaccgatgcgatccggtgcaaatcgattatttcttgatgaaaacagaatcgatgttcgaggatacgaaagcggatattcaggttatcgcggatccggttatgcaggaacgtttaggcgattatttgaactacgtcgcgtttcagtataagaagatgaaacaggaaaccggatacaaagccccctggtattcgttctggcaaatcaaaaacaagttccagacggttaaggcgcttccggtttgtacgtatcacaaaggtcagggaagcacgtatgatcattcatacatgtatacgcgcgatgcatacgcatacgccgattatgaattgtgtaagcagttgctttatgtaggaactacccgcgcacgattcactgttgattatgtctaagggcttcggccctttgaggttattatgaaaattattgttaaagtcaaagatgtagaaaagattttgcgagaagttgaccgtattggtagagaggggcttgattatctcgaagggttcaattctatcgatatcaatttgttgtttgcaaaattgcgctgcgttgtcaacgcaaacaaagaagttgggttatactgtcctaacgggccgacctacacgtggggaaacatttcacaagatatcgaattcacttttgaagagtatgcagtgatcattgatactttgaaaatgggtcgtaacattcgtgaaaacaaaaacatgcttgagggattttaaatgaatattcaccttccgcgcctttatgctgaattggttgccgatctgattttgaaaagtgatcgttctacaatggaagattaccacgattgggaacatctggacaattttacagaggctgtagaaaacatgatccgactggaaaaatcgattgctcgttgtgggcttcgtcagttcgggatgatggcagtaactccaggcatgatcgaatccgttgatgttactccggaagtcgcgctatcattggcctatttcatggaatcgtataagcggggtcgcgaatgagtcatttacccgtagatttcgtatttgattatgaaagtattggcccgtttccaaaaggaaaactagctgaacttagctatgttccgtttgttgatgatccttatgatccgcctacctttcaggaactgattgctaaaggaagaaagtacaaatttgacatccggaaacaaccagaacgcatcaaagatgaaaaaacgatcgaatggtggaaacagcaatctaaagaagcacaaagggttttgttcccttccgatattgacatggatttgtacgaaggtcatcgacaattctttgctgatttagcggctgacggtgtgagtcgttggcagtcatacgattatactcgcggccctgaattcgatcgttctatgctaaccgatgttgtacgaactatgacagggaaacttgacacgttcgaagatatgccgaccgtgttctggaatagccgtgatgtgcgtacagctattgaaaaccgtttactgactcgcggagtgaccacgtgtccactgcgtaaaggcatgttagatggattcattcagcatgattcgattcatgattgcgctaaagatgcattgatgctaatctatgctaaacgttatgctctggggctggaagaacctccatccttagaagagacagacgaaaacagcataggaaagaaacgatgatcacattaactattatgggtcgccattactacgggaactcgattaacgaagcgaaagcaaaagcctttgatgatatcattaaccaggatctggttaagattgaatctgatcgctatgtcgtgcaaccaggtgatagcctatattctatagcaaagaaactgtatggtgttggtgaactttggcctgatatcgccaaaatcaaccgtgattctattccggatgcacgtctgatccatcctggtatagttcttcgattgccaaaactggtaaaaatttaaaacaaagcccttgacttcggttgagggcttttgttatattgggttctcagaaaggagattgatatgaatttcactaaatttgaaatccggttgttgattacgctggctttttgcggagcggtatcattgattagtttgttaacgtatatcgctgtaagaacaacgatatggcttcatgactggtttactgtacttgacacaattaaggggtgatttatgcgtatagcgattattggggcggctttgggtgtaatcggcgaccgtttagtaaactgtatgatcgaagagttaaagtcatcgccctatccattttcgatggaatggaacaaccaatttcctaatttggttggggaagaacccacgatccataaagtcaaaccataccgaaatccggttgtgcctaaatcattgcaccgtcaatcagtaaacaggggtaaatgatgtcagaattcgcgttagctatccttgtcgtggttgttgtaatgggttcgatcctgttttgtcgcatgtatcagttagatgatacacaggaatggttggacattaacgaaaaacatttccgtaagcactttgcaggtgaatttgtttttgtgaaatttcgtagtgactacaaggtcgagtttgagtttgacggaaaagggaacaactaccacataatcacttctgttattgatgcaaagaaaatctttgataagacacagggcggcgggatccgtaaattgctcaaagaaataaaatagcactttttgttaaagaagcctcttgcattgcgggaggctttttggtatcttgtattcatcgaaacgaaacagagaaaggaatacgaaaatggttaaagtaaaatatgcagcacacgttaaagcaggtgagattgttggtttaactttcggtgctgaaattggttctcagtgggcgctggttgaaaaggtagaagacctgggcgataaagtagcaatcactgtgaaaatgcaaaaacgttttactaaccgtcctgtaatcactaagaaagtgaagaaggaaaaacgtgttaatactcagactttcgaagaattcatgaactggtgcaaaatgtataaactggatacctactaatagcactttttgttaaaacattctggggtagctttggtatagttaccccatcgaaacaagggaggaaattattatgatggttaacggttctctttatcaacaagcagttgcacaatggaaacagaaagttcaggatgcagaacgcgggatcgcttattgtgatgaagcgctggcaagcaatcttgaaaactgggaacgcaaagagtacgagaaagttaagcaacgccatttgaacgaactccctgcattaaaagaacacttaaaatatttgatggataacgaaaaaagccttgcatagaataaccatctttgatatagtacttacatcgaaacgaaacacactttaggagatataccatgaacactttcgaaatcctcgcagaaaaagcagcccctttcatggaagcaatgtacaaagcgcgtaacgctcgtttccaagattctcctttcgaaactgttttctttctggagaaaggccgcaaatatcatcgcgttgttcaggatactcgcaacaaagaaactggtgaaatgttcaatcagcgttctgttgccgctttcatcgataatgatggtaatatcctgaaacctgcaagctggaaagcaccagcaaaaggcattcgtggtaatatcttcaatgacgcagaccgcgcgattgaccaaagcggttatgtggtttatcttcgttaacaaaggggcttcggccctttttcttaaaaggaatatagcatgagtaacaaaaacgaagacgctaaaatctggaaagctgtaggggttatggctgtaatcgctgttgtgggttactatgcgtataattcctggcaagaaacgattgatgcgcaagtacaggaacaacaaaaagccgacgcaatcgaacagcatagccagcttatgcaattgcgctcgctgggatataccacgaaggaagattttaaaaattcctttggtgactataccggatccctttataccgcgtggggaatgactgacggcgattacatgtacattgaaacagatcgttataatgtcccacaaagtgtatgtttctatagtacgccgagagacaacggcaaaatcacgtcatacgcaccagaattcaaaacgatttctgttgatatgaagattgacgggggagaaaccctatcatttgccgctaaaggaaacaacggatccgagcggttgtgtcttctttctcctactcgtttcttacgcaacattcaagacgcgagtaatttaaaaattgctttaccatacatcaaccattatgatattgttgatgaagtaaaagaatggaacgtatcgcaaatcggggtgaaattcaaatgagaaaagcacgtaaaactaatgcagtgttgatgattaacggtgaagtaggaaaaccttgcaccaattctaaattcatgcacattgcagggcttccgggcatgacgcttaaaacgtcgtatgatacccattacaacgaagaaactacttcggtatacatgggagaagatctaatggctgaacgcatcatgcaatgcattcacttccctggtgaacgtccttcaattgattgttatatttttggctaccataaaggtattgtaaatgaatctgtataaagaaaatgatctctatgtttctgcatttggcctactcacgtatcacagtatgtcggctggatacgggaaagagttcgattttgtagcaagcgttaaacgacatttggaacgcagcggcgggttgtctattccgcgccaaatccattatgtttgtaaagaaggggtgtttttgaatggtgttcctcatgtgatccctttcaacgtgtttgaaaactattttacaaaatacgttgttcaacaaacggagacgacatccgagaatactgcaacgcgagaagaaacggcgatcgtacttgataagtttttcgaaatcgctcataaagtgaagaaacgcacgaagagtgatgtggttcatcacctatcagcggaagttggcgagatcagcgaatgcctcattcagcctcaacgcggcggtaatatcgttgaagaaagtgttgatgcgattgtgtgcgcacttgatgtgatttacctggaactgggtactactcacggacggtacgaaattgcaaaaattatcaacgaaatgcttgcagaaaaattagataagtggtatcgtacttgtaaaccttgagtttacttgtgaggattatatcatgttcgtatatcgtgtggaattttcttgttctttctggaatgattgtacagaaaaatggcaaacaaaaagcggcccatatgtcaatcgttatgtgtcaatggatactgctgaatggttggatcaattctgtatgaatcctgatatctatattgatatggatgataaccgacatccagcaccggatgacgataatcgattgatgcgcaaccttgaaaaagataacatagactttcaagcggctgggttatactttggttttcagtcaatacagcgcctttctcgttggttcaatgcatatgaacgcgagtacatgcacaatgttggtttcgtctgcatggtatacgaagttgaaaagttgtatccgggcgcacgtcaatgtgtttttgacatagacaaagcccgtttagttaagatgttaagtttaaaagagatttattaatgcctacctatacctataaatgcaccaagtgtaataaagaatttccaaaaatggcaagcattgctacccgtgatgcaccgaaagattgcgattgcggaggcgaagcaaaacgaacggttgataaacctcaaatggttcgtgatggtttcccttataacaagtaaaccccgaaaggggttttctttttcatagaaccctatataatgtcagtgattaaacaaagaggtgaatatgagtttagattttcttctggcagatgatgaaccagaacagaaaccacaaccagccaaaaaaggcgcaaaggttgacgaatcattttgtatgagcgatcgcgatcatattcggttgcgtccaaatatgtacgtcggatcggttaacaaagaagcgcatgaacgtttcataatgggccaatatcgcaaggttgagtacgtggaagggttggttaaaatcatcaacgaaatccttgataactcgattgatgaagcgatccgaactgaattcaaacatgctaataagattgatgtaaccattgatcataatctggttaaaatctctgataacgggcgcggtattccccaggatgatgtaaaaaccccagatgggaaaatagttcctaaaccagttgcggcatggactatggcaaaatcgggttctaacttcgatgataaaaaccgcgtaacgatgggtatgaatggtgttggttctttcctgacaaactgttatagctcgatttttattggcgagactgcaaacgggaaacgcaaagtaaccattaactgtacggacggcgcacagaacatcgattaccgaaccagccccagtaaagaacagggtactactgttaagtttactccagacttctctatgtttggtgtaactggtatcgatgaagaaaccaaagaagtgattaaggatcgcttaatggcccttgccgttgctttcccgtctgtgaaattcacatataacggcgaaacgctctctaatcgcttcccgctgtacgcttccatgtatggggataaaaccattgtccagacaaataatcgcctcagcttcattctggcgagcactgaggacgggtttaaacagaaatcctttgttaacggtctggatacgaaaaacggcggtgttcatgttgagtgtatgattgatggtatctattctgaacttgaaccgatgatcaagaaaaagcatagtatcgagatcccgaaagcacgtgtaaaagaatgcttaactcttgtggtattcctgcataactttaatgcacctgcattcgatagccaaacaaaagagcgattagcaaatacagcaggtgagtttaacaatcatgcgaatttgaactacaaaaagatcgcaaaaatgattatggataccccagaaatcattactccgatcattgaatccgcattgattcgtaaacaagcagcagaagccgccgcgatcaccaaagcgaaaaagaaagcgaaaaaggcaaaaattgctaaacacgttccggcttccggtattgatacccctggggtagaaacaacattgtttctgacagaaggcgattccgctgttggtcagttcatcgaatgccgtaatgaagaaacacaaggcgctttcccgctacgtggtaagcctctgaatacatggggtatgagttttacagacattatcaaaaacaaagaactgtttgagctaatggctatcctcaatattcatcctggtgatacttccggaatgacttatgataatatcggcatcatggtcgatgctgacgttgacggcggcgacattttaactctgttgcttgcattctttagccgttggccttctttgttcactgagaaacggatccgatatattcgaaccccgatcgttatcgctaaagttgggcgcgaggaaaaatggttctattctcttgatgagttcgcaccgttccgcgataaagcaaaagatgtacgatatatcaaggggctgggttctttacgcaaagaagattacgaccgtgttctgggtgatcagttgaagtatgatgtcatcgtacttgacgacgaatacaaagaagtgttagaactatgcttcggcgacgaatctgatccgcgtaaagattgggttaatggaaaacacaaattttctaaggttgactaatggaaagaagtattaaagatgttgtacaggtggaaggactaacgtttgccctttacacgatttattcacgtgcgatcccgcacctggtagacgggtttaaacccgttcaccgtttctttattcactctgctatgcagggcggaacgggatttcagaaagtagcttctatcgctggcggtgttgctatgtatgggtatcaccacggggaaacctctgtagaagaagcgttatcccttatggcggcgcactggtgcaataacattccgttattcgaccgtgatgggttctttggttcccgtttggttaagaaacctggcgcacctcgttacatcaagtgcaaactatcgccaatattcaaagcaatttatatggatggtgatttaacgccagttcatgaagatccggaacatgtgccgccagcttactatctcccgatcatcccgatggtactggttaacgggtttagcgggattgcaaaagcatatgcaacaaacattccgcctcatgatcctaaatcggttgttaacgggtgcattgcatatctgaatgataaagatttcacactggatctgaaatatccttactttaaaggtgaaatcacagacgggacaatttacggcacgtatgaattgcaaggtaaaaccaaattggtgatcaccgagatcccagtgaagtatgaccgtgtgaaatacattgcaatccttgacaagctggaagaaaaaggcgttatcgttagctacaaggatctatcgaaagaagattttcgttatgaagtaacgctcaagcgagagtatgccaatgggttaacccgcgaaaagatcctgaaagatttcgggttgattgaaaattcaaacccaaacattaacgttatctttgagggcaaactatactcatatgaacgccctgaaacgcttctaaaggatttcgttgatattcgtatgaatgtatatcaacagcgtatcaataagcgtatccaggaaactaaggaagcgttagataaagcactggcaaaggttgcgtttattgctcaaatggtagaatctcctgattctctgcgtggccttagtcgcagcgaagcggttaaattcgtgtctacgtggataggttgcgagaatcatgccgaaatgttagtggctatgaacatctaccatctaaccacggacgaaagcaaaaagctggaagacgaagccgaagaattgcggaaacagttgaaatactgggaagaaacaacccctaaaattgagtatctcaatgatttaaaagaactttctaagaagttgaaataataacaaagcctcttgcaatgcagggggctttttgctatattggttttgtaccaagcaaaggagattctaaaatgttgaaaactcgtagtgcaatggaagtaacccactgggcgcgtaccatgatggaaaaacacggtttgatcagtaatggttggacattccggatcaatggacgcattacaaaaactctgggccgttgcagttataccaaaaaattgatcgaactatctggtcgtcatgttgcggaagatatctacgaggatattttagacactcttttacacgaaatcgctcatgctcttgtcgggcgaggttatgaacatggtaaagtgtggcaagctatggccttgcgcctgggtgctaaaccttcaccgagtaaaacaactacaaaggatgctaatctggttgataagaatgagatcctttactgtttgttcatgaaagattatcaaggccgtgaagtctatcaggctaaagctgataagaagttttacaacgatgtgatgaacggtgttaaggatatgaaaaacatttggatcagtgggcgcaaggcatatacaaaaggccgtctgtatatccgtccagtaacccatgaagaacttgcatacattcgcaaagaggggtaaggtatgacacgttgtaatgcgcctaagttgggaaaatatctgaccatattcggattttgtgcgttcttttctatcattatcggggctatcgtgtggggtatacttgatatgaagaaacagcaggtcgaggaagaaaaattagtaaaattccttgacacatattgcgaagtagtagaatatggcctgaacaaaaagccaacgaagtactcttgtgaccaagttatttttaatgttaagtgagaaataaacaatgaaattacgcgaagatacaccgcaaacaatctaccgagttggtacagataccagcaagggacgaaacaaactatctctacgcgcaaacaagaaagcgtataagatcctttcttcgacagtatacaaatacaagatccgcgcaatcattcgcgaactgtcttgtaatgcgatcgatggacacaaagaagcgggaaatcagaacccgtttgatgtccagttgccaactgctgttgatcctcgttttgttattcgtgactacgggatcggtatgtctcctgatttcgttagtgatgcgtttaccgtttacttcgaatcaactaaaaatgattcaaacgacctgatcggttctatgggtctgggttgcaaatctccgctttgctatgccgatgcgttcacagttgaatctgtaaaagacggtatcaaatgcggttacacaatctatatggatgatggggaaccgttctgcgatcctctgtatgagattgaaagtgatgaacctaacggggttactatcactgttccggttaaagttgaagatatcaaagaatgggaaaacgaagcagcaagggtatacgaatcatttactgatattcgtcctaactttgttggtgcttctattctcaaaatcaactatcagccgaaagaagcaaccaacgatagcggggtgatccgtcataaatcagcatacactagcggtgtatatgctcgcatgggtaacatcatttatcctctggataaagatttgtatgatacctcgatgttctattgctatacagaaagccagtatacgtatattattgacttcccgatcggtgaacttgatttcatgccttctcgcgaagagttgagtatggataaaataacagtagggattgttaaagaacgtctgaaacaaatcagccgggtgtatttcaatcgagttaaatcagaattcgataagttacaaaccgttcgtgataaactgacgtggttccattctctgccttcaatggtacaaaactttgttggtaaagatgctaattttcgcatcaacggtgattctattggctggatccatagcgaactagtcaaaccaaacaaatataatgatgattatattgctgggtattgggcgaacgaatacgacggtaaagatgcatggtatcaggtaacgggtagcggaggccgctggagcaagtataagccagaaacaaccaaacgccaggacatcacacgcatttattatccgtggaaacagaagaaactcattctgttaaaagtggataccaacacggttaaaccgtatatcgtcgggtatgcgaaaatgcataacctaagccgtgttagctttgttgcatattacgatagtgattcaaagcgtgagattgttaatgatatcgttcggaaaggtcattttgatgaatcggaaattgtgtatctccgtaccagtgaaatgacaaaagaaaaagagatctatgatgcagatcgcgaaaaatcaaaagcgctatatgcaccgaaaaattcagaaccgcgcccaaaaaccccgaccgtatatcgttatgagttggatagtaacggcaatctggcaaaaacttctctgtttatgacaaaatcagagtttttatcactggataaagccccaggtgttcggttgtatggtattgatgaatatagccgcttagatggtgaaaattccaggttgtctatggattcagcaatgaaagaatctactttatcgcgtatcatgcgccatactgggatccctgttgtgtttgctatccgtaacagcctctggaagtggatcccagattcaaatctggtatgctttgatgatatgctgtgcaagcagtatgttaaatccgaaaaggcattgaaagacaattgcttgcctggatggattggcaaggaacactcaacagaaacaaacgcattgcatagccgttttggtgtatcgcttgatcggattgtgaaaaaccgatataatgaaaaactgtataagattgttgataccctcgaacttatagtgtgtctggaagggtatgagaaagatggtaaaaatctttccagggcgcgttgtccgattctgcgtgaatctgtagcatcaatgcgcgttaaacgcagcaatatgaaaaaacgtgttgatcaggcatgggaaatctttaaatcactaaacccgttactggcttcacttgttgaacatagcgattcttattcaattcgtccgatttacaacaacgaaaagaatctcagtgagtttaagaaattaatacggtggaaataatggtcaaaattcttgacgaagtacaacagaaagctatctataatggatggttgacgggggcaagtaaaacagcactggcccaacagttcaacgtaagcgcccgaaccattgggcgcgttatcaaccgcaagttagcggaattccctaagaaaagggatgtaaaacaaaagcctaaagtatcagacactgtaccgcgtatgatcggatctgaatcgttcattacggttgtatacgaagggcgcgttttcatggcgggtgaaacacatccgaactttaagaaagcgcatgaaatgctgaaagctggtgatgtcaaaggtgctgtaacttgtttggatactcaagaagcgatccgaacctatagcaaaggcaacattaaaatcattggtcatcagcttctatataaagatgtagtgtttgattctgatatcactcaacgaatcattcgcgaaatgtataacgatcgtccgtatgaacacctggtaaacttctttgaacggttgatgcgaaacccttcacgcgatgcggtataccagctttacgggttccttgtacataatgacattgaactgaccgatgatggttgttttcttgcctggaaacgtgtacgcgataactataaagatctcgctactggcaaatttgataatagtcctggtgtgactgtctccatgcctcgaaacatggtagacgaagataaaacgcgcacctgttctactggcctacacgttgcggctaaatcataccttccacactacgggggcggtgttggtagagtcattcaggtaaaggtggatcctgctgacgtggtagcgatcccagtggattacaataacgcaaaaatgcgtgtatgccgttataaagtcatgattgatgttacatatggttttagccattactaactaaacaaccgcgcctggagagttctgggcgcataggagactatcatgaaatttaaaaacatgccttcggctaacgaaacccgcgctagtggtgaatctattctcaaaaccgcccgtgaaatgtgggccgacgaccgggtagaatccgggaaaggttacgtatttcgtaaaggatttggtgcattttatgttgcaaccacctttatagtagggtatagttgtttaggaatcgcgtggatgcaacgatatcttgaacgtgctgttctttttgtgatacgttttctgtttacattgatcagcgtagtgattagcatcccatttctgagcatcgccttgtttgttaacgtaaaaacaggcgaaattacaaaattaggcaaactggtatctaaaaaatatgaaaagaattctgacaagacttgacattcacaaatatgcaattaaaattggtgacatgaaacgcggaaccttcaagaaattcgaaggcgtggatctgaaagaaaacgggttttacctggtagttgatgataaaacagggcgcgtagtattccgtttctacgtagcaccaaatcaacgccgtaaaactggtgctagtcgtactctgttacgtatcaagcgccgcgaacacgaaccgtctgcgatggttgcgatgctggaaagtgcttctctgtactatgtagcacatgacaaaatcaaaaacctgttcggtttcccgaacctcaacggatcaacgttcgaaagtgctattcaaatgcgttatggtgctggtgaaaactacaccgagtggaaccgcgcactgaatgacatttatgattttgaatttcaaccatattgatgtatactgattaaaactaaccaattgagataaattatgaaactgtttaataaaattcgttctgtagatgaaatcgtagcaactttcgacaaaaccctgtctgaactggaagcgcgtattgctcacgataatgagcaggttgcacaggttgcagcagatcgtcaagcagcagaagaagaacatcagcgtaagctggcggaactggcttcaaaagaaagcgatcatactgcaagtgcaacccgcgccggacgtatcgcagacaagatccgcaaactgctggattgatacaggggcgaaagcccctaaatatttttctttaaggggcttatatgaataatttggtagcgaaacatgatttcaaccgcgcttctactcaccgcgatcgcaagcgagcatttaaagaagcaaaacgtaaacagaaacacaaaggtaagtgtgatgaaaaccgctttgatcattcttgaagaaattcctgaaaatacaacgctttacaacgtcgaaaccgacgatagcgaagtaattgagatcctcaaaaccgcccacgggcattatgtaaacggttccggcaacaccaaagaacaggattatgctgttgatgttgttaacctcatgctggggccgaataccgatgataacctgaaatgggcgcgtgaatccaacattcctgaaaagtatgttggtatgttctatcagtgtaacatcgatagcaaatcaccgtttgaacctgaaaagaaaatcgatctgattgttcgcactgggttcttcttatgagtatacaaattctgttcagtaaagaagatccattaggtacggaatcatcggttcagcgcttattctggcatacagattatataaaaaatcgatgtcgtggcccaaacaacacatggggaagcaacaacgatattgacaaagcaaaaatttatcctcgcggaaaggcgtactggaaaatttttgatattcatcttcataaaacaatgaaagattcgaatgaatgattaaaaagcccttgacttcggtcaggggcttttgttatattagccatatcgaaacgagataccctttaaggagaaataccatgactaacgcaaccgtagttactaccacttacttcatttcttctggtcgtaaaaatgcaatgtataccttgcgtgttgagcgtagaggtggcggttatacttctgataactatatctgcaacttatctaccgatccggagaaagcggaagcgaaagcgcgtgagtatttcgaccgtgtttcagcccgtttaactgaaactgatactttcaaaatggtattccagggctttgcagatttcgatctgttcgaacgtcgcggtaaactgtcagtgttcgatactgaaaaactggaactgctggaaaaagggatcatgccgattggcaagcgtaaaggcgaagtaattgcagaaatgccaatgtttactgttctttggtgggctgaccagtctaaagaagacaacaaaaacagccctgtatttgacgccgtgtgtgcttactgcatgggtgttgcactggagaaggattatatcgccaaacgcgaagaaatccgcgaacagtgggaacaagagcgccaggaacgcatttctaaagctaaccacatcggtgaaatcaaacaacgtctggaaatgaccggaaccgttgagaaagtgatttcactgggatatactcaagtttcttactacacttctgtagaaagatttatgaccaaaattaatgttgatggtaatgttgttgtttacttcggtaataacattgcaaacgaaggtgatgaaatcactttcaaagcaaccgttaaagagcacggagaatacaaagacgttaaacaaaccatcgttcaacgtgtaaaggttttataatgacatacgaagatatgcttaatgaagtgtgcgcgggtaaaaccgcgtaccgcactaccaaccctgatatgattgtgtttcgtgaaggggatacaatcatcagacgtacacaccgcaagtgtgaagtaaaccaggtattcattgccacggtagaagaacaaaaggctactgattgggatatcgtcattgacgaagaaaaccacgatgagctagatcatccgatattcattttgagtgaaactatcggaattcgaccattcatgcatagaaatttttgggggtatcaatgacgttcgatgaggctatgagagccgctaagagaggttgtaaagttgcgccaataggtaggccattcttcgtgtattatcacgacagcgctggatacaggcgggttacgttgggggtttcggcaaggaatgaagattatgttccggatccgtgggacaaattgaaagtctgggatatttacgagaaaaatagcccggtgatgaacttctttaaagcaatcaaacgggctattggaagaacacacaatttaacaccagcattacgttaatcacctcactcgacctaaaatacgcgcggcctgtccacatatgatgtttagcttcatatctggtatattaggccgctttgcgtaccattccatcaaaaccgatccagaatagtagttatcaagattaaaataagggcaactaaaagtataagctactggcacaaaaccacgtgtcggtaggtaggaacttgctttagtggatgaataatacaagccatttatatgattcgtgtattcttcggatgttttatcgatcggataaccgccgaggtttttaggatcgatctgggatggtagttttccctgatattctacaatgtcaacaaaatagtttatattctttggtctgaatgccaataccgctgaaaaatccgcgttggaagtaagatgaactatgctcaactgttccaacgcggattgattaaacttttcagttctttccatttcgatagcccttgtatcgactacaagggcaccttttatcatcgggaatatatcagtccatttgtaccaagttactaccataagaaacataaccattattagaattatttttatcagcaattgtttccatgttttcacacccatcacaaacgatattacccggtcaaataaggctagtttatctacgggatttctctcagccatttttataagactcttcttaggttactatacgtatatttaggatacaacaaaaggctaccatacaggtagccttttaatctatttaatattatgaggtgaatttgttggtttacctatcaaacatattctaataaagcaccaaactggttatccattctagcctcaaaatacccattgagaccgccagcgttttcacatctatatcttctccaaccatcactcatagtagttccgctgaaataaacatcatactggtctccaccggatgcattaaatatagacactttaactcgcctatcttgaccattccaaatagaaaggcaataagggtcgcctttgatatttgtaatagctactagtgaacccacatctccaccagggaacgcattcagcgtcggttggtttgcagagtctcctatgtttactgctaaccctcttttaaagaatcctctatatctagatggatcaccagaagaaccctgtgcatagttaattctgaaaattaaatggaatacgctttgtcctatcatattagacatccaaaacggtgtccctattcttaatttggccccagcttgagccatccacgactcaccagtttcagcctttgctgaacttccgacccacggccctgttactgccatagttatttctcctaaaagatggggccgaagccccatgcattatttagatttaagttcttcaatttctgctttaagatttttaacttcggcagaaagctctttaacagattcaacgagaagtgcaattactgagttataattcagacgaagcataccgccatcttcttcattatcttgagtaactgcttccggtaagatttcttgaacttcctgagcaatcaacccagcagaacgagtagtaccgccagaagtgttatgaagttcataagtattaccggataaggtttctactttttccaaggcgttctcgataactttaatatcagatttagctctacggtcagagcgaatctcaacgttatcaaaagaaccattacgagtacagaagaagtcgccaccagctctgaaatagaaattgtcatctcgaccatagccgttaacattaagaatagcctggtgataatttcctacatattcttggaagtataaggaaacataagcaccattactaaatctacttgttaagccagcggtatttaaatacgcgccacttccgccgccaggataattagtagttgagctaattccgttaaagttactaatagcacctgggaattggcaagaaccactgttccagaaattccacgtcttccctgagataccaccagctcttatactaacgctaccaggctcatcggcccaaacaaggcctttttccgtaccatctgctttacggaagactaaatgagtgttaccagtgttctggacgttaaccgaagttgatacaatgaactcttgattaaatctagcccttccatcaacagttaaaacaccattaacagcagcatctcccgtaacccaaagtgatgtagtttttaactgatcgcctgtaattgttaaccgcccagttacagtaccacctgctaacggaagatacgtgtcgccagcattactaatagcagaagcaaccttatcatcaacatatttcttgttggtcagatgcgagttatcagtaggagcttggcctgcaataacaaaattaccagaagcaacgttgatgtttccatcaacaactaatccgccgaacttaacgctctgtccttcaccaacaccgaggttattacgagcagcagctacagaagttgctccagtaccacctaaattaattggttgaacaccagcaacaacctctttccatgcagaccatgtaacgttttggcagtatcgaacatatgtgccttcaacatcaccgttctttgtagtaaaggtctgcttacatgtccaatcggtatcagaaattttacgcaaagatagaacttcaagaacaaagttgccgtcagaggtaggtttgttcgatatattagaaccaccaccagtagaagtacacttgtataatagacgagtacctaaatcactgcctttaataaccatgttgttaaggtcaatggtcttaccagaaatatcaactgcctcttcagtgccgcgataggtctgattaaaaaccaaatccccttctacctcaaggccgctagatttaactagaatatatttactaggagctagattagaaaccgcagtttgataaccaaattgcacgtatccttcaggagtaattttaagcattgctacggtagcaccgctaccaactttacgtgcaagggtcaatctgctatacttatctgagttctctgaacctaaatcaaccattgatccattagggttttcgacttttaagttagcgttaatagtcaagttaccggtcatggtgtcgccggcttttttaacctgggtgtcgtttgtcagattaccaagccctacgtcggccttagacggtttatttgctgtaccgtaaagttcgttgtatttgacatctcctgcggcaagagccgcgttgttagccgcgtatacacgaactttagcactagcatagtcgatattaatggctgacatggtatcgccagcattcataaaaataccggagccatggctataaagaccattttgaacactaacaccagatttagcaacaccacgccagaaagtaccgccgtatgattttaagcgggtcaacatatccgcattagagataatgtcgttgatggatttaccaccattaccgcctaagccataagcgccattttctaaaacattaccagcaccttcgccgacatcgcgggttgcagcagtacccaaccctaagtttgtacgagcagcatccgctgtacttgcacctgtaccacctttagcaatagacagaataccatcagtaccattgtcaaggttaggtttattcatttcgtcatagatacgaatagccacactctcaactaaaccttccggagcagttgcagagattgtgtaaccagtaggcagataatattcagtaacagtaccgccagcgatagacagcagagcaactttaacaccaccaataaacgcgcgttgagtaaaccacagttctaaaccctcagaggtacgaaccagactataacgcatttggttagtgttatcaattccaggatcgccgattcgacgaatttgcagataagaactaatgtttgcgcttgttaatgttgcgggaatgcttctagcgctacaatcgataaagtcaatagaactgtgcgtattgccatagttaccaccgttagtcaccatcagttgcaagcgactctgccctgagctagggtcttttaacagagcaactttaatccaacgagtttcgttgcctgtagttacagggaaattatcttgctcaagctgacgcgcgttttctacattagtcagaagagtaccatctttaccagggcctcttccatccgtggcataataaacctgggaatttctgaatgtcagattgccgtcattagttaattgaagaacgccagagcctctcaagtttttaatgtaagcgtcattagcacctacacccatttctagtgtaagagtgcttccattcgaaattttaacagtcttgctagttaatcttaaatcacccggaagagtagtattaccagagctatcaagtaagactaattttctggcttctacgttaccagcaccgcgttgtacaaactggattgtttcagtatcatcgtcaatagtaccgatttcaagaatgccgttattgcttgtaccaccggaaccgatgtaccatccatcattgctggcacatttaccgacgatatgacgagttatttcaccacttaaattctcgttggtgaaagtaatagttttaccttccgctacggtaacggtatcattaagagcactaggcccatcaactgttaattttttggtatttgtttctgggatacctttacccgctaactgaacgatcgaagaaccatttttcgtgtaaatggcataatcagccatgttgatcgccagttcaccatctgcaagctgacttgtagtaggtgttttccccgcaactgtgctacgtaggaattgaattttttctaaatcagccatgtttcaccttaataagatccaaaatctatgatagtccctttagtaattacctggtcgagccgtggtacgtgttcgggacgggaagccgcgcctgtgctcgcgaattgcggggcagttaatagccctgtcattgtatcgccagcgcgtaataccctgctattagcatttgttgtgacattatttatctgtccatcaacataactttttcgtgttgcatgacttgcgtcagtagggttagcggttgtaatactgatttgcttttcaaccgtaatattaccctgagtgtttaaatcaccatttcgagcgttgatgactaatacgcgaccattagtaccggaagatgaacgaataccaataccataccatgatacaagatcaatgttggcttttgataatgtcgcgccatcaccatcaccagaatataaaccgttctggtcacttccgcctgtgaaagtagcgttaatttgtagcccctgtttaaaggcaactacacccaaatattgaccaccgcttgctttagaaacgaagtcgttatttgatgcttgcggtttatcgttttcagtataaaccttatatccgcgataggttagagtattaccaaccggaaccagcggaaatgtgccggagtgccaaataggtaaacccccgactgtagaaccagcttttaaatctgccataataacccctttttacatatttataaggcccgatgttccgggcctttgtttatgcatcaacttcacggaattcggaagcagaataatcaccacctggataaaccttagtattaggcaattcaaatatatacggtgttccgccatcgatcatgttgttcattctgataccgttaaccccaaactgtgcagcaaagttttgatcagcttcggcagcagatacctgaaccatcacaaagttacggatcgcagataaactatccgtagcgggtttaggataacgagatacagcaacgttaaatccatcacaaccactagggatcgtatagaactgttcaaatcgtaaccactcatcaggtttatttgcaggaacttcaatcaccgatgatgaagtttgagcagtacccgtaaaccatcgaacagtaacccttgttgttgatccagcatccaataatgctttgctggcgtaaaaatcaccagcaatcatcatagctaatccaggagccataccataatcagccagtttagagatcactgggtttgcaacaggatatactttatattcagacccattggttgaattgtattcttccgtatcttcaacagatcggaaaggtacaccagttcgcccaacatcaccaacgttatcatagacaagatcgattgatgcgcgtgaatcttcttttaaaactccatcgttcgcgtaaaacgattcaatcagtatacgagattttgaagccccatacaatgcaacatatgcagaatttgggaatctctgagcgaaatcagcgccttgccacataacggatctgtttttagcaaaccaatcatcaacgatttggcttgttttgtattcaccgttagtcattatcaaatacagcccagaaggttgagcatccatatattcaacaaacgctttgtttgcagttgctgaattatcattcgataatgtgaaggttttaattggatcaactacagcattgttaattctccatacgttgatcccaacactaggcggtgtccctaccgccttttgatttagtgtaaactcatactgattaggaaccgcattgggatgtgttgcctttgcggttattctgtaagttacgctgtttgtttccgatagaatttgcgtttctacaaaatcggggccgaaccccgccattaagtttgacattatgccacccactcaaatttaactgtctgagtaaccggatctgggtaaatcttaacattaccaactttgatccaatcggtaacagtcatgtttttaaccgtagtaccaacagcagacgttgcaccaatctcaccagcagtaggcgggttgttgctagtatacatgcggccccaaccatcaaatttacccgtaattgggttcatttgacggatccagaaggattgcgccagcgcattaacaccagtaccagaggtcggacgaggtgcccaaatctgataagtgaatgcagttccgttaccaaactgcgttaaagtacccggtgctttaacataggtataacgggtcacaatcatgatttctggattaatcggatctggttcaagaaccggaaccgcataaccaggaagcaagttgtattgtgccgatgctgtgatctcagccgtccagttgcccctggatgcttctgttactgcatccagcgttgaccaatccgcttgacctgcaatgataattgaactgttgcttaccgtcaagcgcccagacatcgtatcacctgctttacgtacatacgtaggattcagcaaggtttgcgcgttcttctcagtaaagactttataagagttccctgattcttctgccaaaatgttaccagcgtccgaagttaggatcttagttgtcttgttgttcgtacccatagagagaacagaaccagcagccgtgatcactgtatcattacccagagtcactttgccaatcgcctgaatttcaggagcctggaatttaacgttagctacaacgccgcgagtatcattatacacagaaagatgaactgtgccagtgttacccgttgagatcattgcaatacgcccagaggatgaacttgcttgaattgaccagtcgttagatgaaccgccattcaaacgaagtttacccatcgatgagccatcaccaacgttcagatctccactaacattcattacccggaaactcgcgtcggcggttgagttaatgttagcctgtacagtggtttctttcgttagagtcaatgccccgttaaccgtctgatcaatatcacgacgaatgaactgggaagaatccagattatccagcttatcagcatcaaccgctttagcaccgatcggtagatagtgtttcagtgttaagttcagttcatacggagaaacagcaacacctacagcggcataaccatcatccggaagagtagaaccagccacatcattaccagaccaagtaccaagccccttagacagcttcacagtaccacgtaccagatcggtagcttgccatgaagtatcaacctgaattgtatttttcaagttcttaggagaaacagccttgtttgtaacggtgccagcggtagtttcagcagccgtagccacctgaatgataccttctgcgctctcggtcgctttcttagcgtgtaacttcttaggggtgacaaatactgtatctaatgtccctgcgttcgtctcagactgcgtagcaacgcgtaaagtaccacgttgagtttcagttgctgattgaataccgatgttaaccgtagtccaaatagtaccagattgagttaacccatcagcagtagcaacagtaatatggcttgtatcgtccagataacctttcagtttagacggtacgatcgctttattcgttacagtacctgctgatacttcggcagtggttgcaattgcaatgatacctgtcagcgtttccgttgcagcacgatcattaagcgttttaggcgttaccgctcgcgtgtaatcagtaccagcgtttgtttctgcctgagttgcaatctcgatcaaaccaatacgaccatcagtagaggttttcttgtgcagcatttccggagtaactacggtcggaatgtttgcacttgcaacagtaccattaataacttcggtttcagaagccagccatacagcgccagattgtaactgagtcgctttatactcacgaagagttttaggcgttaccgctttctgataatctgaatgatcataaaccccagtaccagcctgatcacgatccgtgttggtgttaggagcaccacctgtagcaacaagggcaaggataccagttaaggtcggcgatgcaatacggttatgcaactttttcggggttacaatcgtaatatcatcggtgcttccgtttgtttctgcctgagttgcgatttctgccaatccacgacgggtttcagtcgctgttctttcgttcagcttcttaggagtaacaatcacatcatccagataggtatcggttgaaagtttgttaacctcagcagttgttgctaaccgtgcaataccacgacgggtttctgtagcagttttatttgctaacgtcatcggagtaatagcagtttcgtcgttcgggttgtcttccaagtttttgtttacttctgcctgtgcagccagagcaataacaccagtacgcgatctgttagttgcgtcaacacgttcaacgatcggacgataattagcaacaacccattctttcgtagctttcatgtaagaaaactcgatatacgggaggtaatcactagcagcattaaatgctaatgaagttacactaaaccaatcatcaggcggatagtctttgcgctgcgggaactgcatcatatttttgttggtgcggatcttgtccgttgtaccatctttaactttgattgtacagttctggtttttacccatcatataaagggatacgtaaacgcgatcaccatcagcaacatcagttggaagggtaactgtaacgtttggtatagtcccagaagggtttgcagtaacaaaaacgtaatcgttaggaactgtgtttaaatcactatagatacgacgcagacgaacacgattatcagcatcatatactttccattggctattctgtgcatcaaagatgaacataccaaagccagatttctggctagttaccgaagtaacaccagtaattgcaccgtcagaaatagtgtgtccactacctggataaatctgcaaaacggctacgttgatagagttcattttatcagcgtcataggttgtgatcacatcaccatcatttgcatatttcggcaactggagagtgattttacccgtagcactgttacggaaaactgtcataccagattgtaactggaatgaacctgttccggttgcgttcacgatctcagaatcgcggttatccagagtttcagcaacacgccatacgttaccgttatagataaacgttgcgatcatgtacgggtgggtcagtcgatactgtgccgattgtacagtacgtaaacggatctgacgggtgttagacttaacaaggatactgttcacacctactaaaccaccacaatctttaaacgtgattacgtcgccctctgtcgggttatccggcagcaggtacagaagttcagtaaagcgtccatcagccataatgtaactaccagattcaataatgctaccgtctggagtggttacgttactataaacccatttcgggtcattacgagttgcgatccatttggattcgtcgaaagccccagcaggggaagcaatattctgttttgcgtaccagatacgacgcgcataaatgatcgccatgtcttgagaatagccacgggtcgggtcatactgctggattccgttaaattcattgaaaaagtcaacgttaacgccgtcactcagcgtattacgatcagccttcccaacgttgataactttttcaccagcagcatcaaggccacttcgtgcgcggaatgatttagctaccattatcttttttcctatattgtattcaataccaatatttatatacaaaaaatggcccgaaggccatttaactgattatttattacttccgaaccatctttttatatttcttgattgtttcgtctgtaatctggtttcgtttatatagaggggttacaccgaacgcctcaacaccacgttcattaaggatcgttgctacgatttcctgtctgataaaccagcgcttaaccttttccggaaactgttcattgatacttttaaacagtttggcttcccaactatccagcgtttcagggtggataatatgatcaaacccttccagaaaatcaatcgttgttgcgtgaatagcgtttgctactttgcgaatgtattctttattcatgcttcacccaaatactctttcaattgcatataaccaccaataaaattaccatctacaaagatccgagggtaagtaaatgccatgcttcgactacgaacacgtttcgctaactcttcaatgcggggccgatcgtaatcaaaccccacactgttatttgctggctttagaacagaataaaattcgtattctaatccatgctcatcaagtaatttccgagcttcaatacaaccataacatttatgaagcgattcgggaataccgtaaatctcgattttcatcaattgctttccttcgtgccggagtgattttgctaatgatatctttctttgtatcagaaagcatacgctcaatcaattccaccgcttcaagttgttgatgcagagaaagaaggttgatgatttcctttttctgttcatcaatagcagcttccttgtcaatcgcgtacagcttattatcaccgaaaacatgctgtaatgcaaattcaagtgcctgtgaatcagtcggcgctggtagtacagaaatcgaagtgatccgcttgacaaaaggataatcaaatcgcagatcattgatatcttgttgaacaggttttacagtcatccacattttaggatcggaagatacgaaatttaaatcaggcgcggcgatttcttctttagtagcaatcttcggttcttcttccggtaaatcatatggtttgaagtatttccagatatggctagggatctcatattcgaaatcatcttgcagaacataagcaatgtcctcagtatccccaatcgcaatacgatcgattgtaatatagccgttgtttttgatcaattcagctaaagcatttcgccaggttttttctgcaaattctttagcgtcgatgttcagggtataagatttaccttctaataattccatgtgtcacctcataaaaaaagggtgccggagcacccagtttaatttacttgcttacttctgctacttttcgagcagctttgcgaaccaggtcggaagcagtacgcagattttgaagcgcgtcctcatgggctttaaccgcttcttcaagctgtaccattgcttttgcgatttcttctttcttagccgcttcgtctacattgatagcgatagcgctattaccggaaacgctaacaggttcatcaacagttccggttgccagttcacggaagaacgaacgttcagaatcaagcagatagtaaccaacgtttccgtttccggtcggggaatcaatggtttctaccgttttgctcaatcgatgatgaccgagcgcagttgtatggtaaacggtgtatacaccattactgtgttcatcggtatatgatttgatcccagggttagcgccacaactatttttaaattgctgcggtttaaccagaacatacgaacggccttcaacaaatttagtcggatccagttcaaccgacattgccgaaccgccatcaagcatttgatcaagatctgcggttgctggtgcaacaggcgcaaccggagccgtaacgttggcttttttcggtttggctttctttttcttagctggagccgcgccaacttcgacgaaataacgagcttcccacgaacgcagagagctaaaagtcatttccggagtatgatcgattttgaaagtatctgaattggttttcgagataatttttacctcgttattcaggaatttttcgatctgtctcgcctggatagtgtttgcggtgttagatccaccgtgtgaattggtagtaaacccttcacggtcaaccagtttgtaagttttaccaactacgaacgttttcagttcatttgcttgaactgtccacgggcaagaaccgcgccctgtattacggatggttttcaggggaatgttccacttccagcagtagttacgcgcttctttacgggttttgaaattcaggatcatgatattatctctcaattaaagttaatcgtcatttacgatgtggtaagattaccatagttacacattaggtcaagcaatatttttaatttctatcgaatttttagcgaattcgatcatacgttgattatctgaaccgcgaaacggctttttcgttggcaaatctttttcatacttaccatcaatcagaacatcaatgtaaggaagtagcttagaacgttctgggtcggcctgtaaagcctccagtgtatatcctgtccataaccatacgtttttctttggaagttccttagaaacgcgctcaagcagttttaggatagtaggatagttgtcacggtaaagcggatcgccgccagttaatgtaagtccatcaacatgcggattactcaacagagaaatcagatggttttctgtctcttccgtgtacggtgttccgttgcaagggttccatgaactgcgattatagcacccatcacacttatgattgcatccagccacaaacaaaacaacacggatcccttttccgttgaccacatccatgttataaattctaatataattcattcaaatctccatgtatagcctttataactttttatttcaccgcgacagcaagaatgaacctttcttcacgaggatcagttctttgatccgttcaacaataacgatgtattcccatttagctaacttttgggtatcacaccacttttgaaactctttcatagcctctaagtgacctttactccagtacatttctgcaatttcgttgcaaagagtttcagtagcagtgtttttgattttcataacatcctccttagttgacaagaaggatgttactacattcagatatacaggtcaatacttttatggataatattgaatgaaaaatgaaggatgtccttcgtagttcacatcaatagcaccaattttaacgattgcattgcggcgggtagcctcttcgacaatctgatcggttaggcttacaatctcacctgatacccaatgcaatttatgttccggatctgtagccccacagaaaaacagttcaatttcgttagcttccagttcacagcgtagatagttcaaattacatgaatttgttttgttgaaaatcataatttatacctatttcaatagtttaccacgtagataatcaggagcttttaaaattttcccgtcgtctacatacccaacttcaattaaatcatcaattagattgatagattccccagatgctgcatagaattgcaaccttcttttcttttcgataggcccaatataacaaaagccctcaaccgaagtcaagggcttttgctcattctacgtaaaaccatactttattcttatctgatttgcatcgagcaactatagttccctgagaaagacctagtgatttggcggcttccttaacagaatcatatacgataccctcgccggaaactcgacgacggttcagagcaggtttaccgaacatatgatttttatccccgactcttttacctttatgagcaagcgagatcttctgtctggtttcttctgttgtagatttacccgtatgtttaagaatgcggatttgtcgttgttcatccgtctcattggcataaaaagactttaacgatgtggagattttggatttaagtccaggacgggtttcgaacaactctttagattgtatcgacattctttctctatgttcgggtgtacatacgacagattttgacatctcgttgattttttgttgatgttcttctgttctgacatatttctttaatgcttctgaaatccgtttacgatggacaggagtaataatcctccctttcagagcatcactatttttctttctatgttcttcgctttgttcatatgcggttcctcctttaccgcctggcttgatgttgtaagtatagggaagtgaaatgtaatcatcggttactaattcagcttcttttagatacatttcttcttctgtatcgaatacatgtaaaatttctttcctaaaagaaccgatgccatagaaatcaatagcatgtttaatgttcttcccggaacccatataacgatcattcaaatcatcggttttatgagcgccgatatactcgcgcccgtttacggtattggtaattttataaattgtataaaacatattgcgccctcaattttaatatatttattgaaggcgcaaatactaagtgttcctagttatgttttacacgatgaataatttctttttgtttccctgcattcatcgggcgatctaccgcaccaagataaccgcatgtacggcgcgtgacgctcattttttccggatcatggttcccacaatgggtacaatgaaaaccgtcttctgttggcttaaattcatcatcagagccacattcaaagcatttatcgaccggaaggttagttccgaagtagtccagtttatccattgcataatcccagactttttcaagggcttccaggttgtttttcatatcagggaattctacatagctgatatgtccagcagttgcaatgtaatgataatcggcttcatagtcgattttctcgaacggtgttaccttgcggtcaacgtccagatgaaaactgttagtgtaccagcctttatctgtgatccctttgatacttccgaatttctcatagtccagtttgcagaaacgatgacatagagattcagcaggggttgagtacagactaaacccaaatccggttttctttttccatgcttcggtcgcagcgcgtagatattccagaatcagtctacccatgttctgagaaccgatccggtcgaatgggtgttgtccagatccgaaaagcatcagcgtttcatgcagcccgatatagcccagactgatagagctacgcccatttttgaacagttccagaatttcatcatcgggtttcaaccttacaccaaacgcaccttctgtataaaggatcggggctacactggctttaacaccgcgtaggctatcgatacgagtcatcagggcttcaaagcacagttccagacgttcatcaaggatacgccaaaatgcatcatgcgcgtcttcatcttcctgtgcttcggcttcaatcgcaatacgaggaaggttgattgtcacaacgccaaggttattacgtccatcaagaatttcattaccgtgctcatcattccacacgctaaggaaactacgacaacccataggagatacaggaatgctagagccagtaatacgacggttattagccgcgctaataatatccggatacatacgctttgaagaacattccagggcaagttgtttgatgtcatagttgcgatcctctggatcaaggttgattcctttttccatgaacataaccagtttagggaatactggagtgataccctctttacccaggccgcgaatacggtttttcagaatcgctttctggatcatacgttcaaacatacccgtaccagtaccgaaagtgatggtaacaaacggggtttgtccgttggcagtatgcagggtgttaacttcgtattcataagactggaacgcgtcatacacgtctttttcagtcttttccatcgcgtatgtacgatcgccagaaataccgtatttccgtgcatccttttcatgtttttcatacgtcatacgagcgtatggagccagcactttatccacgttcgcaaatgttgtcccgccgtactggtgagaggcaatctgtgcggtgatctgcgccatgagagcggtagcaacaccgatcgatttaggcggttcaatatccgcgttacccattttgaaaccattctcaagcatacctttcaggtcaaccagacagcagttagtgtaaggggtgaacgggctgtaatccagatcgtgataatggatgtcaccggaatcatgcgcttctacgatgtgtttcggaaggatatgattacgggcgaaatgcttcgccacaatacccgccagcaaatcgcgctgtgtcgggaatacccttgcgtctttgttcgcgttttcgttggtgatctctttgttggacagattcaccatgccggagatatctttgaacagtttacttttctgctcacgggcaatatcgcgatcgtggcgatattcgatgtatgcacgggcgaccgctgggttcgttttcatcagggattcttcaacgagttcctggatacgggcgatcttcattgcgctaccatcgcggatctgattgtactgaaccagcatgattgcggcatcagcatccgtcatagtcccaccagctttatacacagcgttgcgaattttttcttcatcaaaatcaacggttttcccgtcgcgtttttctactttcatttcgttgccttatggataatatctaaattgtgtccaatctcgttaagatatttgatcagttcaaccccgtcaacaggtatatcccgtcctacaatctcaaggagttcccacatatcaataacggtgataggagaaaaattagtcaatgtgcgaccgcgatcatcaaacatcgttcggtctttcggtttgacataacacaaatcagagtcaccccttccaagtatccaatcatgcagagatatgatctttttgtcagtggaggatatcaacatcatcagcttttttttctgttgtgttgataatcgagcgtttagatatttcatttcgttgccttcattaattgctttctatattttgcggttaaggctttgcgttcgtctttttcggcgtactcaaagcccatagaaaccatttcggcaatcatatcaggtttggtaagtcttgaaaaccattttaccttatctggtatgaatttgtcatgaatacggttttcggagtagtcttgcttgagatatgcaagcagattctctaaccaggcgatgtagtcaacatcacgggacaccagaccggatcggttgaatttgtgctttacaataccttctgtaccgttacataggttacacagtaggccgcgcacacgtccggcgttttcgccgtctaaagcatggtcatggtcgaggtgatgtttttcaatgtcgccctctaaaggacgcttgcacagagcacagcagcccccttgtttctcaaagagagcttgcttgattgttgggtaatctttcttagtaatacgtttagtgagcataataacaccaatcaaataaaggtgttaatatttatcccaacgtgcgaacgtactcacgcagttggtcaaagccgccgatgtgcttaccatcgtggaaaatttgaggcatggtcagtctacgagtacctaacaggctttcgagttcagaaatgaccgtttcattcaggatcggtttgccgtctgcgtctttttcatcggctacagaaacaaactcatattcttttcgttttgcgtccaggagacgtttagaattcaggcatggagcgcaattataaacagaagggatataaccaaaaatcttaaacatatgttaccttacattaagtcatccagtgtttcagggtatgtatttacgtcgcgtttctggtagttgcacacgtagacttcttgcgttttattttgttcgtaagaatcagtatgctggcctaacagatactttttatcgaggttatgcacattatatttttgcatccactcgatcaggatatcattttgctttcctgcatgatgtgtcacgtttgataaaccaaacttgataccccgctcatgcagggagtcaaggaaagcatataactcgcgttcgtgatctgcgttccagaatttgttatacaccgcatcagtgatcagatacggaggatcgcaataaacaaaatcgttatcgttgatttcaatatcagagtatgaaccagaacgaaattcaattcctgtcacattctttttgaaatgttcgaaacgtttttctgtcataaagttgagggttcgttttcctacagcagcgttaaaatcgcctttgtcgtttgtccggttaacgttgctgaatgaatgcaggatcaggacatagagccataaaggatctttgttctggttgtattcatcacggaatttcagatactcttctttattgtctttccccagccccttcgatgcaatcaattctcgcaccggagacaggtcaggaagcgttttaagacgctcatacatatcaatcagcgtcttatcataatcgttgcttagaacgggtttagggacgtttagcgacacactaaggccaccgcaaaaacaatcaatgaaacgcatgtatgaacttctttcggggaacagcttgaatagttcaggtaatagcgattgcttgtttcctgtgtatgggatcacaccataataactcataattcacaaagccctttttcaaattttgcaatggtatcgtacttgtaaccacgattcactatgaagcattgagtttcacccaatttattgatcatgtcaatagctttttgttcgtctttcttacctcttaactgtaaggcaattcttacgatctcttttagtgtttcgtcgttgacttcttccagtttaaaggaatacccagcgattttagcaaaaagccccttgcgagctacaaggggcatgttgtcatagaaaatcacggttcctttgtcgtttttgcggatactaaatcccggcacggttcctaatttcctctaaagtgtcacgggcagtaatctttccgttgacatagtatgtgatcatagcatctttccagccttccggcactttctgttccagagtatcaatggttttaaagttaacaccatcagtgatagtcattaacaacccttttttactctttttccattcagcgccttttggacatttatacacaccagtccacacaccgttaattttgattgcgcacattttcatcgcatatttttgagtgtcgcgggtaacttcttgaagcaatccgccgcccataccaaacgcgatgttttcagacgcccaacggttagactccatccagttcaacacccgattgattgtttcagggccatgaatttcatcgccttgaatgatccttactgctgggtgtagtactttatacccttttgagttcactgtatagccaaagatacggcccagttcttcaagagcgtacatgatattgtctaccatatcaccagaatccggacgaactaccagagtaccgcccttagaaagaatcgaatctttatattctgcaatacggcgaaccgccgctttaaaatcccaggaatcatacacacatgcatacatcccttcgccgaagatctcaatactgtttttgtacgcaaggtcttcgttttctttgccgtaagaaacggtagtggaatgttcgcgagcaggaattgaaataccagccgccatttcaccatcatcaaacgctttctgacaatcttcaaacagagagatagccataatcagcgcttctacggtatcagtaccgaggaagttatacaggtgtgcgaggccaccaataccagcggattcagcagaagaggttccacgtgcgccgaagtcatgcaaacgggtacgtaacaccatatcaaatgcttcaccttcgagatcggaggttttcttgagatatttcttcaacacttttttacattcgcgggatagagttgctacggttgaagggaaccatactcccctgatcgccagggtttctacgtgtcctgctaaccacagcgcatttttcccagcatggaaagttgcaaccggatttttaaccgctactggggttccttccggaatcgctctgaattcaagagggatgtaacccagttctgcaatttctttccaacctttgtagttgaagatttcgcgcccaaagtgcattttgtacaaccgattagcaaaatctacgttttccatagtcaccggacgtgataggatttgcgcaaggcggttacagccagccgtaactacttgatcaaatttaccaccacgagattcaatataaaacagcgcctcttcggagccagttggatattgcgaccagtgagaaaccttataggaatctacggaagtgataatgctgttcagttcttcgaaagttttgttgttcataaacgtactccacgttttaagtttattttaaaatacccgatccagtcgttcgggatggattgtattgtgatatttagacttacaatccttactggtttttctgccattcgaacagaaaactttgtgatacgttgtctttgtgtgtttttctttgcacacagggcaaacaatcacagaacctattttagcagccttagccacttcatacaagttctttacatcaatttgtcgttcttttgtgataacccgaccacgaaattcagcaacaacagtttcatcacgtacagaaccatcactatattgaactttttgtttactactttttcgtttggatcctgatatttgagaggaaccggataaaagttcacgaagttctaaacggtctttgtaagcaccactgttaacgcagaaatattccccgtcttcttcgtcatcaaaatcagcccaatcttctaaagcctcagcttcatcgctcatagtggttccttagaaataatctttgttgctcaacaggtaaacccggttatcattgtagtcaatgtaagcatcccaccaaccagcacaatcaacaccatcaacttccaacgcctggataagaacgctacccgctacgttgtcatattcgtacattgcatgtaattcatccagcattgcttcaacattggcccgtaagcctttgccattgttagcaacaccttttgcttccaggcaatatccagcataagttgctttcattacgatttccatgatgtttatccttctgagttagtgtcttgtctacgggagttagaatactactataaccaacccccgtcaacacctttttaccaactaatgtaaaaagtgaattcacttacacggcgatctgttttcctttcaggaattttgaaaccgaacacttcacgttcttcctgatttcggtacgtttgattgtacttactagccagagaatttgtgatcttcgcggcgttgcgtttttcttcggtatcgaatgttagcccttcttcttccaaccattcagaaacccgttggaacgcatagcgagtacattcaatacccagacaagagccgatatcgtgcttcatatcatagataaggctttgttgtgtcgcgtgtttcagaacaccttttgtgattgtatcccgcgcatgttcgatcatcttagcattctgatcgttgataatttctcttgctcgttctgcgagagttggtgatcggccttctactggagtttcaccgtcagtaccgatactacgtacatgaatcatattttcacctattgcgttattaacagcccatctttcgtatgtttcacgaagtaagggcgcatgttcaattaccataaaaaatccaacgttgggggtttgatattgatccctaacgtatcacacacatcgttcaatacactttctttgaagagattgaaacatggaaccctgtacaatctagccaatcttacagcgatcgctgttccacctttaacacatccttcacgttcttccgcccaaaataaaacaaaatcggttgggttgtcaagattttcacgaagaacctgaatcgtgtttcgcgcataccttctttgaacgtattcattctgtgtatcgaagttacctgctacctttctggcttcgtcagcggctttctgcgtgtttaaatctcgaaagtcgatgatatcctttccgtttgagaaaagtccgttaaaaccattctcaggaaggattatacacctgttatccggactatagtcaaacagaaagtgactatccataccaggagcgccgccagaataagccctgatcccgcgttcgttcaaagcacgtccgattttaacagcaatgtttgcgatacgttcaggaggtttacggctaccgatcagggaagccgcttttgcatcaaccagaatctgattaaaattcatggttcaggattttgccccatacagggcgaatcatgttttgggcttcggttacaaacagctttttagccattgctgggtcttcgaactgttcgaggaaaggcccatgattacggctgatttcttcgatagcatcctgaaccgttaagcccataatgcgaccgaaatctttcgcagtgatcgaagccagatccagtttcgaaagaacgtttttcacacggttctctgtaaggtaacaaacaaactcatcgagttggtttttgtctttttctgacagtgaaaccggagcattaaagcgggttgctttcttcgctttcttctcagtgaatttggttgttttgcatttgattgcaacgcgttcaccgtttggcataaaagcaggtgaaacaggtttcattacaaaaccttctgcaatgtttccctcttcaacttccatgataggatatacgaattcaccatatactgtattatcgctaccaatgccgctatttgctttattcacaacagattcaaacgtgatcggcagttctttgatctcttcaaaagtaccgtatcccaacagcggggccattttcaggccatgagatcgagagatcagcgagcacaggttatccggaaggaattcaccatttacgcggatatcgaatacgtagaaatctttttcgccgtaatcaacatctttctgtacaccacgccccgcaaattcaccgtagacttgaataaccaaatcatcataagttccggtctttttgagggtttcccacatcttacggatccctggggaatactttgcaactactgctgaacagccataaaaatcttcggctggcttaacaacatcagtacgctttgcgggggtaacggtaataccgtcatcggtgataaagctaaagttagcaccgtggatcttttcacgtgcaacccacacaccgccagtaagcccgttcataattacaccattgatgaacttaccttcataatggttagtcagagaagaatatttcttaaacataatttaacctttcattttcacacgtttttcaacttgataaagtgctttacgcagcaacttcacttttacttcatccagaatgacatcacccttaacgaatgcatcaagctgtgatttttcggcattagcggcgttgataaccgctattgtattttcttgtgtatatcccagacgtggattaatacgttccattgtacgggcatacgggctaccgggtttattgctaaacagcttgccggaatactgacaacgttcagttgtcatcaatactttccaatcttccagagtaaggtcaaaagaatggttgttctttgcggcgtgttcatgcttgagattatatgaacgcgcaatacgcagatccagttcaatagcagacgcacgacggcgatgctcgatgagttcagggctaagggccacgatctcaggttcttttgctttacgaaccgcttctacatcaggcacggcttgatttggttttacgtttgaagtagcaatactagcccaacgatccatcgcagatttacgcattagataatccccgcatcttgaaacgccagcgccatagaggtgttaagatgttcgcgtttaaacgggcgaggtttcttttctttcttcatcggacgtttagcacgttctaaattgtacacacgcttacgatggatttcgatcgcttcgcggcgcattgcatttttaacagggagatttgcagaacggaacgcgcggatacgttcaatttcctgtactacctggtaaatatcgccgttatctaacccatgttcacgggcaatttcggcataacctttacgcaaatcattgaatttgaaatgaatttgcactttttcagcttgagacagttcggaaatgctacggtgtacaattttcatattattttcctttggtagaatcgatttttgcaactacattcaacacgctatcgtttcggctgtcaacattttttagaacaaaagttactaccgtatacactccagcgctcatgttgaaattgtcaacaaacgggatctgctgatcatcaagagtattaaccatttcttccatgtcatttggatggtcaacgttgatgaagatactttccgatacatgatttttgtatcgggttccaattcgctcatcgagttttttacacattacatcaactaacatttgtttgtcaatgcctaaaacaccagagtagatcacatgatatagtttcatacaatatccttttccgattcattaacaattgcaaaggaaaggaatgtaaaagcaacccctaacccgaccatccagatagccgttaaatcaccataaattgatgaatacgcgcccatcacttctaagcgatatcccagcaagaaaacgagatacgccaacactttatcattcataattcctcacaaaacgcccatgctgcatggtaaacgctcgcgcctttgtcttcgttcatgcatacaacatcaaccggacacacaaccctgtacagaacaggatccccacctatagaacgcgcggcccttccagcgtatatacgagctaacccgatatcagcggtaaagaaaacacggtctaaatttttcttcctgcctttttcagacagagtatcagaatcacagggaggcaataacatgctttcaataccagcagcagtacacgaaccgtgatagtaaacaacgttttcatttctgcaatgtatcgttttcatgcatcctccctttaaaagatgcttacattatatcaaaggcacaaatccatgcaagaaatttctcgatctacatcttcttttgtcttgttgacatacgccaggtattcatcggtatacattttccgctttttggcgattctttcagcagccgcacacatttgagcttctgacagtttataaggcaacctttctccaaatccttcaacagttagacgaacgaaaggaatagcagaagttataatgtcattaccataagcataaccatttttagcaaatacggctttgttgaatcgttcatggtgtacgccttcaacctcaacctgatcaccatagtaagcaatagtatcaatgcgatggttaagaatgatagcaccagattcaatgattttcagtgcagcggcctttccttgttctcgagcataagccacgatttcataagaaccgatatctatagcggaaccatgattaccaacgatgtaaaacatggaattaattagatgcttagagatataggcatacgttttatacatcggatactgttcattacgcagacacatacccgctttgtattcacgtcgtaactgcataagattttgaatcacttcatcaatacgccagccgttagggaattctgcctttttctcacgtgcaatatggatcaaagcgtttccatacatcgcgttaaaagtcatgatccggatcccttcaacgtaaccattgatcggggcttgccatgtgatagggctatacttcggatcgtggtcagggcgcattttaggagtatggtggcgacggaacccaacatgagtcgcaaaacgatcttcaatttcacgggagtagtagttgaaagagtccatgtcgcggtcgcgggaaaattctgcaatgaagcgatgtaaatcaattttcatatcatataccttatggtttaaagttcttccggcctatccgtcgaacaccataaccatacaccactgtcagaaagcatgtcaataaataatagaaaataaactggagaattttacatgaagtcatttaaacaattcacagaaagcaccttaaccgaagcgctgatcaccttcgggggccgtgcttatcctaagtttggtcaggttgttattctggctggcggtgctggttccggtaaaggattcacactggaaaaactgctaggcatcgaaggtattacactggacgttgacgccctgaaaaaacttgtaatgggtagcgataaactcgcagcagagatcaagaaacaaacgggtcatgatgtcaaaacaatgaacctcaaaaacccagaaaacgtatctaccctccatcatgtgatcgccgacgttttcaacatttccaacaaaaaccaaaaccgtgtttattccggtattatggcagcaccagaagatcgtaaacctaacctcatctttgacgtaacgttaaaaggcatgagcaagctggcaagcatcgcgcgtgatgtcgaaacgctgggatacaaaaaagaaaacgtacatatcgtatgggttatgaacgatgtgcatattgctatgcagcagaaccagaaacgcgatcgtgtagttcctaaagaaattctcatggatacccacgaaggcgcggcccttactatggcgaagatcctgaacatgggtgattctcttaaacagtatatggacggcgacatttggatcagctttaacaaagttggtgttgatagcgagatcaagaaatcaggtaacaaagggatgtttgttgttaagtcaaactacatcaaagttaaagcccgtggtaagcctcagaaatctgtagctgaactggataaggaaattgtggctaaagttgcagcatacgcaccgaaaactgacacttggggttgacattaatgattaaacattatagtatgcatacacaaactgaggaattgatatgaataagtttttctttgatatggatggtgtattgttcgactgggaaggttcatttgtgccaatgtatggcgaaccctcgatgatgacagaagatgagttgaaaaagtgcaaagcaaaaattgccaaaactgatttctacgaaaatctggaaccaatcaaagaaggatttgaattattccatcatttaagaacacttggtgatgtagcaatactaaccagtgtcggtaaattcaattctgacggtgttgccgaacaaaaacgtaaagcattacaaaaagtattgggttacgttccagaattccactacgttaaaagtagccatgaaaaagcagcattcgctggtaaaggaattctgtttgacgatcgggcaaaagcggtgttgcctttcagaaaagcaggaggtaaagcaatcctctttgttggtgataagaaaacagcgcttgatgaattaaaaagattgtaaaaaaagggaaccattgcggttcccttttttgttattgattagcctttgcaagcgcttccgtgactagctgaatattttcttccagggtttccgcaaggaaaatacctggaactttattagctagatgagaattgttccagatttcaagatgtttctggttgcgggaaatcagaacaccacgataggcatgttctgcgaactgttccggatagtcaatgcgactaaaatcgagacgagagatccccagttcagcgcaaatcttatctgtatagttcagtttttctttcataacccaaagagggctgaccgcttccgcgcgaagcagcaaagtagcaggatcaccgattcggcgttggaaactccattgaaggaggtcgatcccagcctgaatacggggaaggtttttataaaaatcagtacgcaccaaagaagccgccatttcgtcatatcgttcttttggcgttccttccggacgtacaccgaacttatcataaaaagcctgagaaaattctgctaaagtgtcgtcgaaatcaaaaagaagtgtattcattgtttgccttattttattggtcagtaactggttcaggagcaggagtcaatgacaacagactaaccagtttaccattacgagattcgattacatgaatatcaccataatcttcaaacgcctctttcagagtatcaaactctaatttatatttttcttccgcataatcgcgccagtcgtcgcctttctcaaaagcatcaacgataatatcgtatagccagtatggaagatatgtaaaactggtattacgccacggaataggatgaaccgtagtccatttttcagttgccatttaaagcctcttagatttcactcattttatgaatatagccgtttcgcgaatcctggatctcacattcaccattttccatgaacgctttcaggatcgtttgtacttcctcactatacttgtaatcagcataatcagttttccaatctttaccctgtgctttctgatacagaatttcatcaagtacccaataaccgatcggggtaaagctggtatcacgccacggaatcgggtgaaccgtccatttagaaacgagatcatcagaataagttgtcacggtgattgtatctgacgtggtttctgttgctgattcttcatcagcaccgtgttttaagatcagggtataatcaccagcagttgtaccgtcaaccgtagttgtgtaagtatcggcggttgcgcctggaatatctacaccatctttttgccaacgataggccagaaacacatcacccggatctagttcagtagtttcaacctctaaggtcaaagtttcgccaatcaaaagttcgtttttgttggcgctaattgttacagaaggaattgccataaatttaacctcttatgtttattggtatttatagccggagtattttaccgttacacgttccgcatttgtcgtagccgttaacacgtccatacccattgcattcaggacaaaacggagtagtaaccccgaaaatgttacggatcgcataagtggattgttcttcggtcaacccaacaaacccatcagtgttaataaaatgatctttttgtgaagaaagcatatcggtgtcatcatcaagaatgagatagtttttacatccgaaagtatcgatccatgccttgatttcatcaccacgcattccagtgctatgagggaagttagtgcaagttttaccaatgatccgatacaatccccacggataaaatatttcacgtagattatgggtactgttgccgattctccacgtagaggaaatgacgatatcacaattagcgtgattcactatccggcgtaagtgtcgtgcgcattcgatgtccatatgttcaccaaatttcatgcaccgcatattatttagaacgccatcgatatcaagaaaaataacgttaccaatctcgttaccatcgctcaaatcttttaaacattcgtgatttaagttcatatttcacctaaaagaaaaggggccgtagccccttgttaatcaataaaatccgcgagcttcattatccagtctacgatctgcaatcatatgagcttccatttgacgagatacgtaatcaggatcacactccattctttcttcttcgtagttgtcccaggtatcagcaacccatttagaaccgttccaacgagcataaccaggttcggcatgagcaggataatttgcttccgcagcgtggcgaagtgcttcaccaacagtgtaataaggagctttagaattgacgattttcttaacttcaccattagtccaaacaaacagaactgggtagtaagcatttttcatcatgttcattttgtatttccttcttcactgcgagagccattcccccgccttcgaatacaaatatactcgaatagcagggcaaggtcaactactttttaaaattattttttgaacgtgtagaactggctgtttcgggtttcccttacagtaaccatcccatcacgatgcatgtaccatgccagcgacttgagggtttgacgcgctgaataatgaggacaactgtcagggtgcttgtaccaatccggattttgtttcatccaatcatagatccaatacggacacgtataaaagccagtattcgaaacagagcggcccatcatgatgatagacggggtaaacccttccatccatgccagttcatcagaaaacgtctcagaatcgcttacaggagcttgtagagcgtcaggaacaatttcaatctggtctgcgatttccggagcaacctctttaacgtaatccatgaaatcgttagtcacatcaataacaacatcaggaacggattgttcaccttcgtatgtaacaatttcaggatcgggggagtcgatcaacagttccggcttttctgctggtacggcagattccagatcagcaagcatattttcgaatgacttctggcggttcagtttgacatcaaacgtttcttgcgcataggtagcaagctgtaatttggcttctttttgttctaaggctttgaaaccttcaaccttttcgtaatcaatactcattgtagttctccaatgtttatcattatttagcctataaatattcatataaaccgtatataggatacacatagtggatatcgaagtcaaattccttaacactagtcatgtgcagattcaggcagaggctaacatagtctatgaattgcgcgactatttcagcttccagccgccaggttatcagtaccaggcaaaatacaaatatggtggatggaacggctacatatacttgatggactataacgggaaactgccctacggtttagcctatcttgtaacaaaattcgcggagtctcgcgggtattctatctggatggatcctaagatccacgaaacagaagaaattacccagccagattttgacaagtggttagaagaacacccagtatacgacggaaacaagcagattgatccgtattggtatcaaaaacaatcggtgttccatgcgattaaaaaccgccgtgctgtgcttaacctcccaacgtcagcgggtaaatctcttatccaggggttgatatctcgttggtgtctggaaaattacacaggcaaagtactaatcattgtcccaacaaccgcccttgttgatcagatgatcggtgatattgtaaactatcgccttttacctcgcgaggcaatgcttggaatacgttcaggaactgctaaaaacagtaatgcattgatctacgtgtctacgtggcaatcggctgttaaaatgcctcctgagtggtttcagcagttcatgtgtttgatggtggatgaatgccacaaatcaacaggacaaagcatacagaagatcatcaacacaatggatcagtgtattttcaagtttggtctttctggttctctgaaagaaggcaaagcaaacatgatgcaatacattggcgcttttggtcaaatcttcaagccagttgatacaaatcgattgatgcaggaaggtcaagttaccaaccttcgaattaataccatcttcatgagatacaaagaggatgagattaagaaaatgaagggggccgattaccaaagcgaaatcaagtatataacatcgcataccaggcgtaacgcatggatctgtaagctggcgttgaaactggcaagggaaaaagatgaaaacgtgtttgtgatgttcaatcagatcaaacatggtaaatggctgtatgagcaactcaaaaaggtatatgacaacgttgtatacatttctggggaaacggggattgatgagcgaaacgaaatgaaacggatcgcggagtcaacgaaggggctgatcgtaatcggttctattggcgtactgagtacaggtatttctgttaagaaccttcatcacatcatcttcgggcatccgtgcaaatctgctgttatagtcaaacagtcaattgggcgcgtactgcgtaaacatgattctaaatctcttgctactgtttgggatttggttgataacttagcaacgctggcaaagtccaaaaatgctaaaaataaatattcatacaaaaactatggtatgaaacacgcaatcgaacgagtacgcatttacaatgaagaaaagtttgactacgtgatcaaacaaatcgaaatttagaggtcaaaatgaagagtttcaacgattttcgactttatgaggcggctattgatgatttcatgagcaaggtcgcctcttgccgtactatggacggccttaaagagcttgaaaaatattacaaaaatcgtgtaaaagaagttgatgttgcgccgtcagacgatatttctatgcgcgatgcgctgaaaggtcgagccgaagaattaaaggccgaactagaaagcggagaagaagaaaagttctaaaaaagaagccccaaccgaaaggaaggggctttttaattttgggacgcaatcagcccaacacgtacatttgattatagccagtgaggtactattctggctttttttactcatgcccttgatcgaaggtatgttatcaatcaccccgccgaaggtaaactccatcggacggcgcaaaagagtacgcctatcatccagcattcttttatcaagcccctttcgggtacgctagtatttatgcactaaaaatcagggtgttcgtcagattctaagagatctggacgttcatcacgatctgtaattccttcaccgtatccaatcataagatcctcctacagcaacatttgaacttcattcagatcatcggattcgttgatctcgccgttttttgttttttctgcgatgtagtcagcacagatagtactacacacgcgcccagattcagtcacaaaaccagtagaaggaaccggacacttgcacactacacatttttcattttcagtagacattatgcaccactttctaatttacggatctctaacatgtttttgatagagtatcctttgtttttgacgatatccagtgctttgctggtgaaatctaccaccatgtcataatactggatcagcttgttggtttctacaatcttcggatccccagcgatcgcgattttgatttcagtagtcccagtatacaccacttcgcacatttctttgtcatgtcttccggtgtagtacaacatacgatccttcacatcagcttcttttttagcatgaagttggatcagttttttcttcgcgtttgaatggtaacgaagccatttagcccaaatcttagggatatccgctgattctgattgcaacttgaggggatctatcagcatatccttttcaagttcattttgcagatcttctaatttcaaactcataacatactcaccaatttacccagttgatctataatatactatattaatttgtagtcaaatttaaattgatctaatataatatattattaaaagaataattatacatgatctaatttataaaatcaaatttatttttacttgatttcaaaaattatttgatctataataattataattaataaattttatcataaatcatttataaattcaagatctaatttaatattaattataataattattaaaagatggagtaagtttccctactccacctattgaatattatccccgttgggttatactatcaacccagtttaggaagtttgataccaacaatctgactcattttagatttgcctgagaggtttacccagtcatcacctttcacaagtctttcattagcagcagtggtatacgggttaaccgataaaccgtagcgcatcagaatagcaactttaggctgtaaggattgaggatcaacagaaatcttgatcgaacctgcctgatcagcttctgtgtatggcgtatagaacagagagccaacatgatccatttcacccagatcgtacttgcaaccagtcagcaggtaatcaaacggtgtattggtgtcagtatagacatagtaaccgtttttaagtcgacctgttgctaacgggtgggtttcatcagtttcatgcatccaaccagacgcagacagaacgcttacaacgcgagaagaggccaggacataggtagcttcaaatgaagtcgttctattcatttcctgccccatttcacacactaattgatacaggaaacgacctaaagctggagcatcctttgcagtgtatgcggttgtagcatcgaaaatgccatttgttaccacaccatcaacgttgtaacgatgtgatacgttgatcagagtctggatgatatctttgtttacttcttcgctggcaacagtacccagaacatcttcaatcacattttctgcgttgaattggtttgcttccagatcctgcataagttccacggtcatttcagttttgaatttacgggaacgaacgttgatattccaacgatccatttcgaaagaagttgtgctaatatcttcgctggtttcatactgacttgttggcgcggcttcgcttgccaggcgtaatttattgctgaatactgcgaccataattgcttcatcaatatcagcacctgcgagagttacgctatcagttgcttcgtatacgacatcgcttgtcggatgtttaaaaacttggcctttggtataggcagtaccaaccgcaccaactggaatgttatcacggcttgcatacttaccggaataggtagcagcgctggaaaacgtcatatcgcctttagggttacgataacgcacaccaaacagggttgcggtaggcaaattagtttcctgaattgctacaagttcaccgtagatcaggttgtttaccgcacgggtaagagataccagatccggacgggtattagctacgttaattgtttctgttccggttgcctcatcaagaacctttttagacaggccaggcggtagctgtgactgacgcaccagcttgttaattgtgtaaaatttttcactcattttatgttcctgcgtaaagtgtataatggtatttatgcaacaaatttccaggtagggtatttgtcgctattaatccgatattttaaaccagagtgggacatactaagggatttcgctgccgctgatccggatgagtatacaactccatctatggatacagaacggcctaatttggccttgtgcgcctctgtgagaggtttatactctctgtctgtacgtccgttcacgtatttagcttttaacgtctctgagcgcttcctgttggattcttcggactgtggtttacctaaacgggattgtctcatcttctcccttagttctggtgttcgcatagcctttgcagtattttcagaaatctttttcctttgttcgtcagaccaaccaatcaatgacataggagcacctttaccacctatgccagcattatacgtatctggacgatttatgaattcgagattgatgatctctctttctttttcatacatttcttcacgggtatcgaaaacatgtaatatttcttttacaaagttattcattccatatttcttttgtgcttttttaaccgcaatccctgaacccatgtatgaatcattgatgtcttctgttgaatgagcaccaacgtaaattttattattgaccaaatttgttattttgtagataatatgtttcataatatagcctcaatcgttttcactatttatagaaatgaaaaagggaacccgaaggttccctttaatatcgttatttttcaataacttaggatcaaagtcctttcacataaaccttgcggaagtatgcgtttttaccgaacatttctttggtaatcataccagaagtgatacggtcggacggagcctgagagcgagagttcgcaaacgggttgatacctacaccgtaacgagttttgaagcccattactggctggaagttcttcggatcagaaccacgcagcggggtcagcgcaacatacggagcgtagtagataccagcatccatttcgttatcgcctttataacccacggtgaagtaatcaccacgtgcatactggtcgatgtatactttatacacgccacccagaacaccagcgaatactgctttagtggtgtcaacgttcagagtcttctggagaccttgacctgccggagtgataccgctatcgatacgagccagagcggaaaccacgttacgggaagcgatgatgaagttaccagcaccacgaccagtttgacgtgcgatttcgtttgcttctttgtcgatctgaatcagcagagctttgtagctttcaccagcccaacgagcgccacgaacatcaatcggatcctggaagtcaaacgcaccagctttagagccaacggtctgagtgaaaccagttttaccaacctgtgcggtatagttgatcatgtcaacgatttcgcggttgatttccagcatgatttcggttgccagaatagcagacagttcggcgtcagcgtccataccgtgaacagcgcggagatcctgagccagttctacagagtactgtgctttcagttggcggctacgtgcttcgataacctgcttatcgatacggaagcccatttcgttccacgggttgccagtagaaccgttgaactgttcttgcagttctgctacactggtagccataccgtaagaaatttcagccagagtacctttttcctgttcggcgataacagcagcatccagagcatcgtcggtagaaccagttacagtaaccggagcgccagaaacgttctggaggaacacacgaccagtttcaacgaaatcgtggaacacaatagcgccgtcagcaatggcctgagcagaagtcagtttggtaaagccgttgctcggagccgcgccctgaccggagtacatgctatccggggagaacatcggatggaatgcttctttagcaccggaagccagcggatctttaccgtacactgcgcggagagcgaacacctgaccagtagggccagtcataggctgaacaccgcagatatcgaacgcgatcaggttaggaatcgcacggcgaaccataccgattacagcagggccgatgttggtgatagcaccgcttgagttaccagaagcgattttggttgcgtcgtaaccgtggtcaccagcaatttcagcttccgccaggaaaccaccgaaggattcaacgattttctcgtcgcggtaaaccggatcaacttctgcgtctttttcctgtgcttccataatggcagcaatcagttgttttttggatttggtagcgatatccggtaagccttcctgagactccagaagatcgttccatttttccatcaattcgtttttcttagacattgtttcttaccttttgaaattaagaaagggcttttgccgcttgtacatatttattgatcttggatttctctgccggaacactttcgactaccggaacaaagtcatctttcgtttgcggagtatttacagactcgtcaacgggtttttcagctttggttgctaccatttcaacaattgcgctgagtttattttcgaaggttgcggaatattccagcccttcaatcagagattctactttttcgacctgagattcggtcaaacctttagttttctctgaaactactgcattgcgtttcatttctgaaatttctttggtcagttcctgattcgcttcaaacagggttttaacttcctgctgattctcagtcagttcgtcttccagttcggcgactacatcaacctgttcttccggaatgacaacgttatgttcaaccagaacttctttgaggcccatgatcagggattcaaacaggtcggctttgatgtcacgggaaacggcttctttgttttctttcagccattcttcggaaatgtgcgcaaaatatttatcagcatcttcgtacagcttagtttcgatttcagcggcacgttcagttacctgagcttcgaccagttcgtcggaacgttccgcgatctgggtaatgtgggattcagcgagttttgcagcgccagcttttacagcttgttcgaatacagtggtgaatgtcgctttcacgtcatcagaaagttcaactgattcgaaaatgctgtctaactcgaccggagtatccaggttctgggcttccgccagcagttgttctttaagcatttttgattttcctgttgttttgtttaatgtatttatagacctttcaaacgctcggacaatgccagaaaagcgtcatcagcactattattctcaacaagcggtttgctttgctgattttccactataggcttaacatatgcatcaggtgcgcttggcccccagacgacatcaacgcctacagctaatttaaagcccttttgtacaacgccgtagcctttgccggaatcggagagcttacctaatccacgggaagaaacaccaggaacccaaccagcacgaatcaacgccgccagtttgtcaccatcaccaccgtcgccttcaacaacaacagcgcggccccaaacatcgttacccttccaccacaatttttcaatcaggatgcaagcatttcgcggatccacattcgggcgcggagggtgattcatttcacctaatgcttgacgggtgttaacttgagttctaatataatcgttaactgcttcttcaagtacgtttttaggatacaaacgacggttacggttaaccttttcggcttgaaggaaaataccttcgatccgcaatttaccgtcttttgattccccaacagattctaaaatagattctgaaacgtcaccgcaaggtaaaccccattcttcgattaaaagcatatcgccgttttcgttgatttgggattcattcatatttatagccccagtgcagcacgtttacgcaatgctttcttgcgcttacgttgtgcgcgagtagcaattgacgggttagcacgttttgttttgagagcacgacgcgcgatctggcgacgttgggatttagttaatccggtagtctgatacgcattacgctcacgggttttcctgtctttgaggcgttctacgttgccacgggaatcaacatgcttgacaattacctcatcaagtgttaaaccttcaacaaccgccatcatagcaagggctaaatttggttcggtgaccgccaaattttcgatgattttaaccgtgccttcatcgatacccagaatatctacacgggctttcgcttcgtctaaatgttcctggagatcttcggcggtgatttcgatgtcaagttgcatttacacacctcactcatcatctttatcggatttatcatcctcggctggctttttatcgcccttttcgtcatctttatcagcgccttcgtcgtctttttctttgtcttcttcgccttcgatgcgtacagcttcggcaagttcaacgcgtaattcgtgacgaagcgcttctgtgcggtcttccatgatggagtaaaaagtttttttagcttccaccagattaccgcttttgattgcttcgataaattctttcatcaaaagttttcctcttccgcttctggatttttaaaacgttcttcttttgattcttcttctatctgtttggcttcgctttgaatttcctcatcagacatccggagaacttctttcattacgtatttatgggagatatatttgccgaccaccccttcaagttggcccatcaggtttaaacggcgttccaaaatctcaatatctttgatttcggaatagtaagaatcttgctgatatacaaaagcaatcttacttacgttttcatcccattcatcttctgtaatgattttcttcgcgatcaagttagtttttaacggatccgcaagaacagggttgaattgaatttgcaattcgcgaataaatttgctaaagttcaattcgtcgcgggtaataccgccatcgttacccaactgaataccgccatcatcgcgaggcatacggcttaacggaatacgcaatgcttcgtacagcttacggttaaaccatttaacatcgtcgatatcagagaaggcagtgccaccgggaagcgttgaaacttcggtaactgctttaccatcacgacgcatcagccaatagtcctctgtcattgacaggttattttgctgattcttaactttaccagtgctcgcgtcatatacaacacggttttttaagccctgtgcaatgttatttacgtactgtgtagctttagggccacccatctgacctacgtcgatatagaacacacgacgttcaggcgcacgggtaatgcggtaaatcaccatagcatcttccagcaaacgcaactggttagctggcttgacagcgcggtgcaggtagcctataatgttgttgtcgcaatcttcaaggccgctatgagcgtaaacaatcgcagagcgaggaatttttaccttgtcattgtgactataaatctgtccgttgtagctataaccgtttttcggtgcggtgtatacgaagtattcacgatagccacggaaaattttaaccccaccgggtagggtttctgtaaccgattctcggatcagttccatgcaacggggatctaactggcgcaattctttgatgccgtcagcttcatttttgtgcatgattttatggaaatagatacgcgaatcaacataccaatcacggaataaacgagatcctcggttatcgaaatcgtgaatattcattacggtatcgagttcttccatgatcttatcttggatatttttactaaaattcgttttagtaagatccatcgtaacaatatcttttccttgttcattaacaatcgcttcgttaatgatttcagaaacagcgttttccacttccggatatgtcatgataccacggtatgtatttattagctgtgttttgttctgaattcgcggatcctgtccggaatagaactgttggaacacagaagaataacgctggtttgataagtccgtttcgatttcgtgcgccccatcgttatttttcggaggcgcaatcgaacctgtatcatcttttaattgggcttcaaattccatttcatcctgtttggcgaaatttttgaaaaaccctaacacattgtctaatccaaaaaagttcatttacaactccgaaaaataatgataaggggtattgctacccctgtatttatagcgtttaaacccaccagtctagcgcgaaagtacactcaaaagtgctcacttcgttgttgctatcccagtctaaagtaacctctcccacgttggtcgggaacaggccataaatggtatgttcggcggttacttcgtcgttacggtttttctgtttaaccgtagcggtttttttgtagtttgcagggatatcccctgtaatgtcttcacccataccatgcagcatgtttgaccatgctacgattgcatcacgggttgtgtgtgcatcgtcgttatataccgtgattgtccagtcatcataggtacggtcaccagcaacgttaattttgcggttcatgtaacctaccggaactttttcaacggtagacgctggcatagtagcggctttacattttaatttaaagtttttgcccaggtacgggatctctacttcgaacaggttcggacgtgcgaaatcaccggattcaaaggcgcgtacaatatcagtaagcattttctaacctctatgtgtatttataggggcttttcagccccttacatgttatactgacgttgaaccaatcaactcatcgaaatccgcaccagttgaggttgctacgaagttcagtgtgatgtagttgatagaacgtgctggtttgacgtagattgatgcaataaactcattgcgatcaataacatccggcgtgttgttcgtagtgtcacaaaccacacggtaatcgtatacaccgcccagggcgcgaacgttagacatatactgtcctgcatccatacggaaggaagaacgagtgaaatcatcgttattctcgaacagtttatatttcgcgttatcgccgatgtctttcttgatcatgttgaacaagcgacgaacgttgatacggtcaaacgggcttggaacagtcgttgcggttttatcaccgtacagaatgtatccagcaccaccagagaaaccagtgaccgcgttaatctgtacctggtacatagaatcgcgatgcgcgttagtcggttcgatagccagtttgatgcagttacgcagttgaccacggttgtagccagccggagacatccacggttgcgatacctgatcggtataaacacagaggccagccatatcacccgcgagcgggatccaacggttaacatcgttgtatttatcatactggaacttatagttaccgtcgatgaacgcataacttgaacttacgttcatgttgttatcaactggggtagtattaccgattttgtagcctgtacgccattctacgaggttatcaacggcctgagccagtgggatattaaccagagcagaacgcggcggagaaacgaatacgacgcaatctgaacgggtttcaccgatagacacagcgtgtttctgtacagtagacgaaatttcggcagtttcgccagcacaagcaccagcaatcagcagaggaacatgcagagattcacgatctgcgaacatatcccaaccagccatgagttcatcagcgcctacagtggagtttgcggaagtaccgccgcccagttccagaacgccggagaatccgacaggccagtttagggacgtaccatacagatactgcgaaccaccgtttgcaaagaaatcatccatgtagatcgttgaaccgtagatatctttatcacctttagcggttgacacgataaacgtttcttggataataccaccacggcgaacgataaacgcgtattggttatcattctgagggccaaagttcatcgaactgcgaccgctgtttttaccagacttaccagaaggataagacttaatgacagccgaagaatcgtatgcagctttagacagaatttcaaccgttacggtgctacccatttcgccaggataaattgcaataacagacggtagcttgtatttggtgcaaagtttctggaaagcagttgcctgaatagtttcttttgcggtgtcaaggttgagcagagtaatacccggatcaacttctacgccgtcgattgtaatcgtagcagaaacaccagaagaactggaaacgatttctgtagtccagccactagacagatccggatatacaccaacctgtttagcgtgtgcgatgatcttagtgctcggaatgaacacagacaggactttaccctgatcatcaacgctggtaacaacaccatcttcttcaataacaacgttattgtgtttaactttgatctgatcgtctactgcatagttagaaccagcagcggtgatcgtggttttgatctgattatagatcgcggttgcgttttttgcggcttctttatcgacgacacgaacaacacgcagatcctgaccgaactgtaaaaagtttacagcgttcatgaaataatcagcggtgtcattgtctggggagccaaaatagtttaccagttcgacttcgttagaaatctgacggatctggtaagctggcccccatgaaaatttaccaacaatagcagcacgaccagttgaatttcgaacaacggtagattgtaccgatgtttctttagtttcaatgcctggagagattaaagccattattaagtttcctctaaatttatataaacgaaataccgtgttggccgacagatattgtttcgtcgccactcgttacgataacaggacataacatatcttcataaagcagttcgcgctcacgtgcgaatacctcatttgccaaccgcaaatcgtctttctcgcaaaattctgcgaatttcatttgtgttgttagccatgcaaagcaaaccagcgccataacgagatcgtcatggaaaccttcttccgcagcccacgaaacacctttttctgagaaagtacgaaattcaagtattgtctttttgttatttatgatgagtttatctttctctatcaagtcttttagggttgagcatccaatcgctttcgatcgtttactttgtttcatccccaaatcattatagctatcacaaataacgttatcgtaatccaactcagaaaacaaagatttagccactgagtggcctgtgctatttagctcgatataaacccatgcttcgttgtacatcataagataacgtaacaggacatcaggcaaaataaggtgcgatgttttgtttgaatgatatacagcaacctgttcaaacggcatagatgtaatatctataatatgcatcgcgtgatagtcctgaccgcgcccttcggctgggtcgagtaccgcaatatatttatgtccctctacaggagctttatactgataaaaattagtttctgtttcatcagtatcaacccatgatagtttagacaatttccagccagcgatcagggttccgttggttcccatgaattcagcacagtgttcctgtaaaaatgcttctttacttgaactggcgatcatcttcgaagaccatgaatacccgtcatcaaatacgccatcatcaccgtctgtatacaaacgctctttaaccgatgtccagatcgccgtgtatggcacgaagccggattttccttctatagcagcgttccatatatcatagaagtggttaagcccgttaggtgtcgttgtgataaggattttcgatttacgaccagaagaaattactggctgaatcgctaaccacgcatcaataaagtttggaataaacgcgcattcgtcaatgtagatcattgcgaaggagttaccacgcaccgcatcgggagaagatgcaaacgcaccaattttacatttgttatcaagttcaatagaacctttgttccattcaacgataccaggttgcaagaaatcggggagaagttcaatcgcctgttttgtacgatccagaacttccgcagacatagaggctttatgagccaaaacgccaacatatttatcctcgttgaaacacacaaagtgtgcaaggaagatagcaacaacggttgttttacccaactggcgagacaggttacaggcaaccatacggtttttatgcatttcgatcagcatttcgcgctgatagtcacgcaactgaaccttaattgtaccatagtcaatgtgggtgatcgcgcaatatgtttcagcaaaataaacaatatcgtcacgacacttaacccactccatcaacatctgttgcgtccatttcgtttggatgtacgcgcgtttcaggtttgggtttccgttatatcgagttttcttgtttcctttgtttttataagtcgcaaagtttgaactgtcttttgcttgaatatcaactttatggataccgttaatttttaggtaatcactaaactttgtcggataccattttttatcatgttcgctttgcgtccactccatcccaaattcatcaattttctttttcagataatcgggatgcattaatccgattgggtgatctgattccttactcggatcgatcgtcggttccatttccatcagggtttacctctaccgcttcaccattaatgaagccttcttttggttcgtatgcactaccatatttctgcattaattccgtaggggaaccaacaaatacagttgcattctctatgttcatttcattaccgccgccattacctttttcagatcctggttttgttgtttcttcggtaatttctcgcatttctttatgaattttcatcaatccctggttagaattgtttaactgattcatcagggttgtaaaaacttcaacgtgtctcggagattcagagtttttagcgttatgcaaggcaatttgtgccatatccatgatcatctgattcatgtaatgcgcggttttacgcgcaagtgcatagtcttcctctaaatcaggttttcgatctgctgggtgtgactcgacatcaacgagttcgagtttttcatatacaaccatttcttccccagtttcagcaccagggagattttcaagatcaagtagttgttttacgctaaattcttccattattggcccctcggtttaggaggttgatcaccgctaggaattgggatatcattagcatacgtttgaatgtattcttctcccgtgtaatcctgtataggcatatcagccggatccacctgagcatcaacggattcaaaattgtctttgtccaacgggttcatattggaaaagaaatccgtgtatactgttctgatctcgcctttaatctcgttaacaggcggatacaggtagccctgtaattcaaacattaaagaccattcaatgtgtcgccgtgtcgttgcatcgccttcaaacgatgtatcaggggaaacagattgcagagatattttaatatctcggtctattttaatgtcgtttttatgtaattctgtaatacgacagttgaaatgcggctggaagtatggcagtatttgttcgataatttgaaacacatcatcttcgtaacgggtatacactcccagttcgaacatgagacgatacggagcaggattaaactgcgttactgtttttccaggtgcgcgtaactgcgtcattttttggtttaccgcgatccccgttttacgaattgcgttatactgcaaatcaacgagggatagattcatacgtggtaaaattgtttccgttttagcaacattttcctgactgtatgcatagttcagcttgttcatggatgccaggaatttttcttttgatgcgtaggtaatcggaaccttgataaatttttcttgttcgccgcgaatgcgtttaacttgcacgtgattgaaaagacaacccatcaagacaatataatttcgcagcgaactattataccagtagccaaacattttctttttcctgtatgggttaaagcgggtataagatttctcctatacccttacatgtatagggtttcccctggttatatttatgggaactgtgcgaacggtgatccgcgcccgttaacaacatcaaacgattcaatgaattcatcgccttcatcttcaaaggcttgatcttcttcgtactgttcaatattggtatcagccaatccatcaagatttcgaataggttcgagatccagatcagcatcgggagcaagattaatcccttcatttcgttgcagtttaggatccaattcttcaccagtatagataaatttaacgaggttgattttacgttgaggacgatcgccgaactggaagaacgggtcaaactcaatccatgtaatttcaaacaggctgttatccatagggaaataaatcaaatctcccagaacagggatcccgccatcagtttgatgtgcaaataaacgaggattgaccacaagtgtcatttcatcgtttgacatcataccgaatttactgtaaaaatctctctgcccttcgtagtttgcatacgaatcgatgtatgctgcaattttccacgattttgtaaacttcgattcacggtcttcacccaaaattttatcaatattaacaaattctcgacggacgtaatacatatccggagatttcatttgaattgcttcggctgttagtgaatcatgtaactgttgagtagggttatacttgtaccagttaacatacttattagtaacttctgtttttaggttattgtctacaccttccccagattccagttgtgcaaataagttttcatcccaatcacgcatagttccatccctcccatttcttagagtttattctgtgaaatacagaattttttgttatgccgtagtggtctccgcattctttcaatgttgggtattcaacgccatcaacgataacttttcttgcagcgggatttttatcaccagaaacatcatggtgttttctatttcttgtcattatacgggtggcttcttgtctatttttaaggccaatttcgctatattttctatttttggcaatcatagacattttatctctagattctttacttcgttttgaacctatatttgggttttttgatggatcataaaaagaaactccgccttttcctccccgtactagattagcacaactggaataataatccattatctcatcaactaataattcttctgcttctgctagtaattctctgttgggaaattctttagaccatcgaatgcatttaatacaagaatggctatactttttaatagctctttttatatatgtccctgatcctgtatatgggtcattatgtggattatcataaggggaatgacgcttccccccataaatttttaatccagtagaagtttcaaaaacaacaagatacaatctatagtgcatttttcctccttacatcatcaacactggaagtgcatcagacagtaacagaagttcttgacggaggttttctttttcttgcatagcttcctgtatcagtcgggttccatccggagcaacaccaccaggcaattgcataccctgaaacttagccagcacctgaccgtttacctctttaacaagagcagttgcgtaatctttcacccaacggttgttatacgcagaggatgaactctgaacgcttgtaccttgaccagccttcacaccgcctgagacagctttgtaggggttattgtatatatctgctatagttggcttatcttcgccatcagaacccgctgtagcgtatccagagacgttaccgaccatactgggtacatcaacaaaggatctgatcattgcttcgataacaacaatatcaccatctttaacggttccgtatactgcaaactgtcctgtgtcgtcgttataccagtaatccggaagcggagacaggagatcttgcattgaccgctgatagctcatcatctgtgtaaaatagcccatatccgcgccgtatgcgttcattccgtaggtacgtgatgcacaaccaccaccgcccagagaaccaccagtaaggcccatcaggaaatcagtaaaccacggataaaccgcagtaccatccatcgatacaagggaacccatgttagtacgcaatactttagtaattgcgaaaatgtgttctttactcagatcgaaaatatttttcgggttatccggccccagggtaagaatgatataccctttgttagatccattgtaatgatattctgcatataggtctaatgctcgttgaatgcagtcataaacctgatctgttgtcacttcgattttgacgatcggagcacctaagcggcgcagaatttcatcttttaattgtgctgggttgttcgtaatcataaagatcctcaaaaggggccgaagccccttgttaatcgttaagcgacagtgatcgccagttcatcagaaacgatgactttatggcttgcatcagttaccgttactttgtaggttccggaatcagaaggctgtagcgaatcgatggtaaatgtgttggagtttgtgccaacgtttacaccgtttttcgtccactggtaagacagcggagaaacgccaccagtcatagttacgcttagagacaatggatcgccagtagtgtattcagtatcaccagttaggttagtaccgaatgacagaggcgggtttttgctctcataacggagatcggcgtcagcttctttgatgtacagagccagtttagcattcagatcttcgatagttacgcgatctgcaagtgcctgtgcaatgttcaacgcttctaaatcctcaacacgtttattaaggtcggcaatcagtgcataaatgcccgtttcgttaccttctgcgttatcgcctacctgagtgaacaggttgcgggttgtctttttcaaaccagcgcgagtaacaggatcggaactaacaccatcaccatagatttctttgttaatctgctggctagttgcaacgaggccactagaagagttacctacaatgccttgcagttcccagagtgcgctagtgttggtgcgcaattcaccctcaacaacactcaaacggcctttgatactggtaggatctgaatcttcaccaacgtcaccagttaagatcgcaacttgtccctgcaatccatcatcgccggattcacccagaatcatttccatatccatcaatctgcgtttagtttccgcaatatcataacggatactaccctgagcagaagccgtaccgatttgaccgttaatggttgcaatttgtgcagtgataccagttaccggatcattgatttgtgtagccagagaactaacggagttttccagactgttcacacgatcgttaatggaactggttgaacttgacgtgcgaccgatataactattaatcgcatcaagttcattttgcgttacaatagaaccatcctcaaggatcttgattcgcgcatagattgatcgggttgtggcaagaccagaatcacccatttcagcacgaagttcttttacctcttctgtcagttgtcctacttcggaaagcgcccaatcatcttccagtttggttatgcgagtttcctgcatagaaatagcacgttggttactcagtacgcggtatttaaggccagtaccagtagaagaggggtcaacatcaccatcaacgttaaatccaggatatgaaccaacttctttcttaatgtaaatgatatcattacgaattgtgcggtgtttaggatctttttctggatcgtattcaccaatttcatcgttttgagcatttacagaaagggttaactgtgctaccttgttctgtgtttgggtgttagataaagttaatgcccgaacatcctgatccaactggttaacttttttgattacgctctcatcaccaatagcatcaatgttttcagtaatcaagttaacctgatcgattacttcgttgattttatcattatgggtgatggtattttgttctaactgaaccgcgttctgctggatgtttacaccagttcggttaagactaccagtgtttgacactttatctggcgaaccgtccagagtttcaccgtttttgatccaaataatcttcgtttgagtcgtggcgtcatctgggacgccatcaacaaacgggatcttcggcaacgggtttaatttgtcgatgatcatttaataacctctattgagtacgaattacgtagtttaatgcgatgtttttcatgcgggtttcttccccacccacaccagtggctttagttatagaagcatcaaatacgcgagcgctttggtcattcttttcggcgcttttcagttcgtaaactgcttgccatttaggaatattaccgccgttctggtagataagctgtaatgggtgttcatgccagcccaacatatcgccttcatatgtaccatacccacgattagggtttagtccacgcccacggtcatgaccacgtactgcaacgcctcgacaatctggaaggttaaaccaatcaccgccaccaccaaatgtataacctatacgctcaaaaagtaacggatagttatttttattcagtgagcgaccatcacaaatatacaaactaccgtggtcagtctgaaaaccagtcatgacaatagcacctactgggaaatgccaatcaagatctgtccacgtctgatatttgttgttatatattgcgctattctcataaagagaaccgttaattaccgcatttcgatcactaggtaataccgcagcgtttgaagaaagtgcagtgtttgccacataaccaacagttgttgctaatttgacaacaccgaactgagatccagttgcacgggtattgattaattttttcgcagtaatcgctttggtgtcatcagtacccgcgtttgcttctgcctgtgatgcgatacgaataacgcccaggttgctttcagttgcagttaaacgaataaacgtataaggtgaaattgcatacccttcacggatcgtaccagcctgaacctgtgcaactgttgccagttgtaccaaaccttgcgaactttcggtcgcacttgactgaacaggaaccagagacgcgatcgcttgcttgactttaagcggagtcatagttacagtgttatctgtaccagcaacagcctgtgcagtggtagcaattttagaagaaccccaaaccgattctgtacctttgcggttattgaacacatagttcagagatcgcggagtaatagacgatgcatcgttagttacggttgtggattccgcatcagtcgaatacttcgtataaccccatacggtttgtgatgctttagggttctgcatacgatatgctaacagtttcggagtaacaatcttagtgttatccgtgccagcgtcaatatcagcttcggttgcgatctgagcaataccacgaacagaagttgttgcgataggaagcccagtatcagtacgcgcccaactacctattttttccaacgcatcttgtacgttagttatggtatcaggccaatcagtacctgttgggtcaaatgtcacgtaaatggatttatcacttacgtggttgattgtattgttactcatgtgttatccttatgcaattcgtttgaagtaatacacggttacttgcggagtaacatcaggtaagaaaccagaacccaacttaacccatgaaccatagccactttttgcggctacgtcgatagttccgatttgacgaataccgttttctgagatatttgttgccgggtgcggaacactatcaataaatcgacattcaaggatcgtaccatcaacacctttgcggttaacttccgcgaaatatttttccgctgcaacgaattcagtaaatttgttgtatgccgtttcacaaactgttgcggcgttagtcccattatcaaagatgaaaggaaagccgtacacgtgaactacagcctgttcttggtctgaatcgatgttctgtacaataccatcaaaagaaacgctctcaacctgctgtacagcgattggaggggcatcctcagtcatggtaacaacgccgttaatcgggatttgctcgataagcgtatacaggtcatcaattgcggattgtacgtttccatacagaacaccgcgttttgtttggtcaatgtttggttctccgatcgaacgtttaccgccgatcagaggcaacttaccataagtatcatactgtaagtaatctgcttctttagagaggacgcgagcgccctcccttgtttttgaaatatttttgtaagccattatgcaacccttatccagcgatgtgcagtcatatacggtggaatagttttgattttatcaggtaatgtgttaccatgattcactttcaatgtatcctcacggtatttagtgtatccagggccagaagcatcaggatctaactgacaaccaccaatgatcacagcaccattttcatcagcaataagaactttatcttttgatacaagttcaggaacgttgatgattttgatttctgtaccacgatcgccaccagtaccacctgccgtatgactcggttgaccaccactatctaaatcattattgtttaatgcgaaatcaggatccgttacatttgatgtccagccagccaagaaataaccttctgcgtaacgtttccaaccaccaaatcccatataatcagcagggtttgctgggttatgtgcgttttcatagatggttccgatcgggtggataatatcaaacatagcctgaatatccagaatacgcccctgataggtttcccctgtattacgcattgttttctgagaagggttattataatcggtatattcgatacggttcgtcaatataacttcttcttcgttattgagataaaccttatcagatttttctttaataccgccagttccttcccaatccatcagagtaccaatatcattgttaaaccaacggatcgttacaacgtcgccggattccagttcctgagcaaacttgattgaagtcactacagaatcagtgaatactaaactataatcctgtcctgacggaacccatacaccagagttaccaacacacgtactttcatcaacaccttccgcaccttcacaggaaaacgccggatagtcagcgtcaccgcctttaaccagttgtttaccgttgagaagcagttcaaacgagttagggttaatcaacacgcgagggttaacaccaaattcagcaggtgtaaactcttttttggttgccagatcacctacccactgttcaccaggaacggtttccagagaagtatcaccagtctgatacatgcgcatcacatacgcttcatagctcgaacgccatgttgctaacccatctagataggtaacaaattgaagcgtgtcaccagcgttacacgggtttttaagacgtactgaattaccatcaagtgcaaccagttcaccaggagcagagccaatcgatccatagtctgagttatcagcattgaatccgtctttctcatcgatgaacagcaagttaccgcgatagtaaacttcgaacgattgcaggttgtattcattaccaacaccgaatacgttagggaagtcagtttgtccctgagtagcaatatacgtttcttttgctactgttgccagatccgaagttgtgattttgtcaatctgtttgttttcgacgtattcccaacggcccggagaacaatacaccaattccacatccataaaatctttaaacagatctttaggagttggggaacctttgatagtatcaccagttgcggggatcagtctaacgttgttggtagcccaacgcgaccacacatcacgcagacgaataaccttgttataatcgcctacgccgcctttcgggaggtttacggtgattttgtttgcactggtattcaacgcccatgattcaccaaattttggtgatagcgtcgtacccgcaaaagttttccaggcacctgctggatgggggatctcaccatcccccagcatgttatacaattctgtaaagttgttgttagtcttttgaccacctcgacgcaggtaatcgcctgtaccatcgtctacaatctgacctattaaaatttcttgtttcatgacgcgatccctgatttaatcgtatctattgctttaatcgtgaatttaattcgatcttctttgatcgcttgcacgttagcgtatacgacatcaccagcaccgacagtaaagtttaatgtaaacatttcatcttcactgtttttcaaaatagcgtattccgttgaataaatcgttttgtgtacacgatccacggtcattaaaacttctgccattttggtaactgtaccagctaagttttctgcgtatacaagcaccttagccccgctaaattcgctatatccgaacataggaatagcagtcgggtttgctttcagtacaagcgccgtagtgtcaacaggcatcgttttagaaccgaacatagattctacagaataatcccattttgttaccgcaccttcttttttggtacaccagatttttacaaaggtgtaaggtgacgtgatatacaactggtctgcaacccccgcgatagtatccccaacttgaggacgaaacgcgataggacgatcaacagagacactacccgtactatttatgaagtagcaaccttcgccaaccttaccagaaggaagaacaacggtaatcgaacctgttgaagtatctatgtcatgcagggaacccagttcgatcggtgtgcttgaatagtaagtgcgtggtagtttctgatagtatccggtagcatggatcaccatgttaccgacaccttcgtttgcagacagcatacgcacatcaccaaacgcattataaacgttggtgatcatttcgttcagtttaacaccaccatcataaagcgggtcgcctgttgatgggttgccgatttcaccgacatcaattagtttttttgctgtttggtaagccattgtttttccttagaattcgaatacaatactcacttcctcagtctgatcaagggagcgaataataggttgtctgttttccatgtaaatcatacgtccggaatcaggttcaagcgcgttagcattatagtaatcaccagttgctttcttttcaggctcggtcgggcttgcctttttaatcaacgggtttacaataatacttatctgacggaaccctttgttaccaggaagcgtagattgcgggaagaaaagagaatccatgtatgcacgaaaacgcattgaattcaccttcaaccgatacactagatcgtattgtcctggataccattgaatcacgttatcataaccccaacgtaccggatcctcttccagttcgccagggaaaggaactacgatatgttcatttgtacagcggttgatcacgacatctggcgggattgtgtagaggtattcccatttataaccgtctcccatgtcgatcccgttagcttctccgcgtggaggttcactagattcatgagacggactccagataccgccgatcctgatacattcaagttttccggtaatgctcgaaatggagcaagaaccgatatcaggaacatcaaccacacgataaaccatccaacctttacccggatcagtacggttataaggtgcggtgtttacaacaacaatatcgttaaagtaaaagattttcgggtttggataacgagtatcaccccagtctttacgtggtaaaattgcatctatcatatcaccaggaactttagtagccccgatcatatgcgtccacatatcactaacaccatcggtgctatcatttggatatggcggggcgaagttagggtcggattcgttatccgaccacgattcagttcgtccaatagacatgtaaatcgtgtttagatcggcggcatcgccgatcatatctttgaagttcatcaagttttcggttcggaattttgcagtaattaccgaccgatacaagttttgttgtgccatttaatttcctaccttaatctgtgatggaggatttggatcacgtgggtttcctgcatcatctttcagtcgtttatccaccaaattacggaactgtgaatatttaacgcctgagcaatcgaacaacggactttgatcgaaccgtcgcgcagaaggaagaacaccgttaagcggtttttcttcaatgtcatattccggaggtacatcaaaaggttcccccgctcgcgggtgtacggtgtacagaggttcaccagtaaccaggtcgaattgttggtttccgttaccgtccatactcgcaatgcgatcaggccagaacttaggataaccactatcgaagcggtagtttctcagaatatcaatgattgtctcgttatgagtcattgacaaaccagagttgatgaatactgttaacatcgtaatacccataaagccgaatcctaccggatgaacaaacctcaatacgtcatccttataacgggaagtcggtagatttgaacgaattttcatcacatagtaagatcgtccacggttgatatagtcgatcgagttgttagccatttgtttaccgcgaacaccacgaattaccattccggtgaaattggttttttctgacttgacaacctgcccttcgataaagttaccttgagcattatgcagagtcattgaccaacgcaattgaccattttcatagtcacgttcgatgtatgtaacgttagcgcgtccagttggtgtatagatcgtccggcctacgatatcctgactgatatttgttgaactaaccaaaatatcatattcgagactgttggagctttcgatctcaacggaaacatcttcgttatacagcaatttaaacaggaacgtataacttgcttcgatcccttttgttgaatagaaatcacttgcacgtgattcgaaaaatctaaccactgcctcacgtttggttttatccaggtaaatgttacggcggttgatttcagaccacaaatattcaacgttgtttttctctctcggatacttgttccggatgaggttcagcaatttgttatagtaactgttgcttcccaacgaaatgtattgcagatagtattcaccaaatttttcgaactgttggttgtccagatagctttgcggagcaaaacgagtgatcatgtgactcagatcagggtcgattaatccaggttcaatatccggcgtatatgggttttcacgttcctgattaaccagacttgccaccattaaagtgttatcgggtttccagaaaatagtgagttcatcccttgcgcggtatgacagttcatagaatccaattatcctaccacctgagcgatacaacagaacaccgtttgtgtacttcgtaaaaccagtaaacttgatattattcaagtagatagtaactgttcctttgtcccaaacttcatggtttacacgaatcgttgacgcaggagacgcgctatcagtaaccagagtatacagggtttccggataaaccaccagaggacggttatcattggtgatccatgtgctaaccttatcgcggaaatgccagctaaagtttgcttcattgtagtactcttgcggcccaaagttccatactgtaggatcgttctgatttgcacgaactgtagcaaagttaatcgaaatgctcgcagtataaccaggaacaagatcgtatttcaccgctgaatgcacatcttccggatacttttcaaccagatctggatctggcaaagtgcctggatatttgtagttaccaacagaaatgtaaacttcatcgccattggttgacatattggtatattcatgagtgatataaaaacgttcatcttcggttttaccataaacacgggtaaacgtctttgcattctcatcccacagataaacgccagcatcgtttgatgggatcacgttagctttgacagtcggatccatcatcgccgttttaacttcaccagttaccagaacgtatagacggtcattcagcacgtccatttttttaacaacaattttatcatttcttggtacgatggtatatgaaacttcatcaaaaatacgttcaccaaaggtcggcgaaccaggatcagtatcaattggtgtgttacgtaacgcaatacggcgcataacgttcttagcagccacgtagagccattcattagaacaagctatagcttcggcatacttcgacactcctcccggtagacgcgcatatgtgttgtatgaatcaacatcaaaatctaaccctgactggttccccagcttctcaaacgttacatcatcagaagaaaaacgaacttcatcagaagaccaacgaatatctgttgacgtgcgcccgtaaaatatgcgatcgtatcctaacacatacgtagtgttagcgctctgataagcaacggtacgggaaaccggattgcctacacgatcgtttaatgctttgtagtaataccacgtttggcctttgtcatttgacactttagccatattctgaaaacgttcaaacaggtaaagcaatccgtttgagtataccaggaacgtgcgatctatatcattacaaacgtgttcgatgtgatcttgaatttcatggtagctttcttgtttcaggatcttatcgctgatctggcttacatcagaatacaggggagagtatacaaaatcctcaaccatcagagaagccataataacatcatcgttaaaatcgacgtaatcacgattgtttttggcgaatttttcattgataaacgaatcagcaggggtgaattcacgcatggttgtatatgcgtaggcgttctcatcaaacgtccataattcatcgctgatcacccaatcagaaggttcaaacccttcatgagttgtttgaatacggaatttataacgtgtatttggggcaacctgatcgctaaaccattcgttttcgtagctataacccaactgcgtccagattaactcttcgtctggaataatagttccgtccatatcacggctacgggccaattcaaccacataatagaaatccatgccaacatcatcccatttaaggtaaacgaagttagcagccagcttatcaacgcgcaaactcgtaatcgaaggcgctttaatcattatatttctccaaatttgcggttatgtatatcacgtatttataaaaagaaaaacccctatccgaagacaggggttaacgattattgactgataggattcatagtcaatgtggtgtattgaggacgtaggtcattttcaaacacgatcaacgatccatcgcgagtaaaaatggtttcttcgagaggctttgcggttagctcgatataagcagcactgaaactatcggcggatacgttcagaacgcccagatcaaagctaatgaaatcggtataatgagacaccgatcctacttcgtaatatttattacgggttcctgcatctgttaatttttcaaagtcatcacctgtataagcagcgatcgaaatatccccatccttgaacgggcctattacaatttttgcgttaccatcctgatccatttccgtagaagcataacgaacaacataactttcgtcttcttcgttggtgaacttgaacgtactggaaatgattgatttcgattccacctggttcaagaaatggatcccagacataggagcactgtaatagttgtcaatttcacggagcaatttaatatctgcttccgaaccgataatagaagtatcagactgatcgacataagtcaacatcttagatacactgaacgatttgttgaaaatttcaacgttgtcagtatagtaagagtcgatcgacgaaataacctgaccgcgtaaccattcctctgattccgtcaacttactgatatcatacgttacttttacagattgcacaatatacagatagttaggatccataatcgacggggtgatcgtcgcgaggttatatttcgaaagatacgtttgcatatcttctttctgtaccgatgttaggcgtaaacctgactttggtttaacagaaatgaaagcataaccaggtttttcgttatcagtaaagcactgtaccgcctggatgatagatccaaacctgtgagacaggaaggattcataatccgatgcagttacacaacggcgttgtgtttcacgcataacaggggctagttctcgaatacgctcgatatcttccgggtcaccaccaccatcagcaccgacataatcaggggatttagtcgggttttcttcgatgttagtgatgctaatattggttaatgtatcgacatagataaaatcttttgcaccgttagccgcttccccatcggttgacaggtattcaataacgatagtcgatccattagcaggtttcaagcccccgatatattcagcggttaatgcaccacccgccacttgttgacttgcttcaccttcaccgaaataaacttcggtatgtccatcaacagtttcacgcatgtagtaaatcgtgcttgcgcctgttgcgtttacaatgctttcgtttgtccagtcttcccattgtgcgccgtttacagttaaacgtacctgactacggtcaatgtttggatctcggatcaggatactcgaaccgtcataaattagttcagtacgaactaaacggccttgcaccaggttcagcattgatgtatagttgttattactatcacgaacgataacaacgtcatctgatacaacaaaagaataactgtctgtattctttacagtaccgatgaattttgtaccgcgcgggatacggatcgatgttggggtcagtgggttagcagccgtaatcattactgctgtgcttgcagccgtgcgagaatctggcatatatcccagttcttgagcagactgtacaacagaactacgcaatgcagccgtgcgaataaacgattcaaatagagccgtgttacccatctgctgaatataaagagtagcatacgacagaaggtcgatcagtacgttcattcgtgagccggaaaaatcgtaatccttaaactcttcttgtccacccagccaatcgatcagatctgttttaatttcttcgaaagtacccccgataaaaatatcggggatttggttaatctgttttttgacagtcttagtcttagcagtagccattattataaattcctcttgatcattcgactatttagtatttcagtactggaacacatacactaatcgaaccaaagttgattgctaatcctatgagagacagcaatttattcacatattgtgtgactttactcaacgccagcgtacaaatttggttgtagattactttgcagtgatctttaaacgagcgcgaactatcaatgaaatttttgtacagagactgagcaccagtaatcgcattttcatatgacttgagaagatcgtcaaatgcgacaccacagaagcctaaaaactcgtttattgtactcatcaaaggcaatttctttaattcttccatcgccatactgtatgtatctttcattgcatcttgtagagatccaatctgttcctgtatagcgtcatacgcggcctgtgttgcagctacagcagcgtttgcaacatccaatgcagattgataagccgctgttgcttcgtctgttacagcgccccacatccagtttaagtactggttgaattttctctgaattgcatcacgttcgaaaatctgattttttaacgttttgtaaagttcctgcccttgttcataaagccctcggatctgttcgtatgactcatcaacaaaagccttgactttttcctgtgcttgttgatataaatccattgcagtaaatccagggaagttaccgcccagaattatatcaagtggtttgatttgcatcatgatgttacggatagccagcaccgcagaccataacgggtttggaacttccggagggatagcccatgtttgcatgatccgaccgtataagtcgattaatgcaacgcaaccgttttggaacatcgttaaacaccaatcaaataacgcgctacacgcatccacaaggtcgcgagcgccagctttgacatattccacagagtaattgtatgcgcttcctatggccccgtatattgcgtttatgacggtttcatatgtttgttgtccggatttgatgattgcattaaatgcatctttcaaagtctgaacagaattatcaccaaacaccagatcgtaaatgttgatcgcaacacctaagatggttacttgaggcaagaactgattaatcaatccccatgcaccaccgataatgttaaacgcagcgctaatcacttgtctgaaaactttcatagcagtttgccatgcttgctgtgacaatgcgagcgcccccgccattacttcttccatcgatacggataaaccatcaaacatcgtcgcgatcccgaatccattctgtacagcacccgttaacatgttaaactgtagcttgaacgtattacgggtttcgttccatgcctgtaacatagcatcactgatatttgtatatgcgaaaccaacagttgccggaatgcacgaaatatcagcacggcttaattcactcggtaatgctccataagtggaaggcattgcaggaggaacaggaggaatgcttgtatctgcgttggtgttaacctgcatacccgtatatttgcactggtgcgcccctgtttcgtcatgcttcatatatgctatacgattaccattccaataataatcaatattggtgaatgcgccagtgtcctgattatacgcctgacgtatgcgagcatcacatacagggtttgttccggaaagatacccgccactgttttcaaccttatacatagccagttcgccagggtttttgtataggtttgattttgacagatccgcgccgtaccaatcattaccaccattgattttagttgcaccgatggatgtaatgtaagcatcaatctctgcttgagtgttgaaataatagccaatcttcggaacaaggatccctgttggttgtccggtatttggatctgttcccggtgaattgacaacaggtagatccgtgcttctatgtccgaacggttcttgagtataaagatgagtaccgattttgattatctcggtatcccactcaaccccaacagccggataattttctgtatgcccttgccagataacccgccgataatagccagcggggatctcagcatcacaaggatgctgataattttgcataattccatcaattattgattcataatccataatcatttaattaccccacttggacggtgccgccagtgatttttgttaatgcgccagaatcaataaacgtgttattcgttgctttgatattgatatctttagcaccgatatccatcgtttcttcaatctccattttcgcattttttgcagtgatcgttgcgtcttctgttacagctacggttgcattctgtttcacatttgcggtaagattctgatcaacgttaactgttgcatctttgtttacagttagttcagcgttacctttaatcaggccaacgtactcaccttcaacagtttgttgaacgttgccacgaacaaactcagttacgttaccatcaaccgtttgttgaacgttacccatgttgtaaatgaatgcgtcgccttcaataactacctgcaagttgcctttaacattgagtttccggccctgcatcacaatttgataatcatcccctacgattttaacaacgcgggttccatccgggcgaatttcttcgtaactccctgctgggtgaacacggttatatcgttcgtatcctggggtatcatcgaattcctgaatgtgtccggatctcgattcaaacaccatgttatacggatattccgcattataagatgatgctggttcttcaaacatcacacgggtatcaccaggagtaaacggatcttccggactagcagccaacaatgtagcaccgttatacgcagcgtaagcagcactcagagagcgcccttccggatctggtacttgtaccccatatgattcaaggttgcccgtgaggacgattttagacacgcgagaagaacggcctggagtttgactagcccacagtgaatttcgaagaccattataagccgcttgccaatcttcatttttcatcgctttcagggtattggtgaatttagcaacaccaccgacgcccatttgaaacgacatgttttcgatcgccatttgacgaggacggttgaggttcacatacacttcacggacgttagcggttctctgaatatcagatcttactttggctaaatcttgagcaaataaggttgatacctcttctgccgtgattgttccgtttgttacttctcgacctaccgctttactgatcgcagcgttaatttttgcagtgtcgcgagtcttttcacggataagcaaatgcccgatcccgattgtcggatatccttcactgtctgtataccatcgtgtacggatcccctcatcctgcttgagcatcttttcgatcgtaaatccacccgtatcagggcggttatcttctggtatctcatccagtgggcgatcgtctgggtttactgctatgcttgtgtttgaatcacgaatgatgacacttgatgatcctttgcctttcaaaccacctaatgcaagggagttaacatcgttaccaacatagcgagggtattcacccataggatcgcaaaaacctttctgtgtgtctggttgttcgacatattcaccagcgacagtaccaattatcataccatcttggtgccatttgtcacgccaataaccaacaacaaaggatccgcgagtgataccagttggagagaagcccacaccagagatcgcagcgcttctaatatcctgaataggcatcatccagggtaaatcttcaacaggaacaccgattgcatcggatttttgtttttgggctgggtgttgtccaaatacacggacttgaacacggcccaacccgcgcggatcatcaacgttttcaaccaccccatcaaagaaaggtgagtgtaaatttccgcctaatttcatgagttagccttttccatttctttaataaaatcattcagaaacgcctggatgtcagacggactaatgatttttattgttcgttttgcttcattttgcaacactgcatcttcataaatatctacaggagctaatacaccttgatactgtaaatacagcattggtttgtcacctttgtcataccaatgaccagggttattggggtcttcgacaaggttataatacttgttgttgttttcatctacgtgatacagaacctgttcaccgccaacctcagaataacgctgtatagcgcactgatacgcggcttcctgatcggagatccaaccatagaaagggtcataaacagagttaagcatcaacaggatccagtagtattgctggtttccatataatgattctgcaagttgttcaggtcgtagtgtgcctgttatctggtaactacgggttttatattttccaatcacacgattaaaataaaatcgatagtctcggaaaatatcagttgtctgggtgcctttgtaatcaacaggcgggaagtatgaaaatagcacgataagttcccctatctaaacgttatattattctatttaggatttacgcaatggctggaagacagacgtataaagggtcgtttgtacccgaaaacatacagaagtataaaggcgatccgcgaaagattacgtataggtcatcgtgggagcgctacgttatgaagtggctggataaaaacccacacgtaaaacgttggaattctgaatgtatagtgatcccgtatttctgcaatgcagacggtaagagaagacgctattacatggatttctatgtggaaatggaaaatggtactacatatctttgggaggttaagccccttaaagaaaccatgcctccaccgaagccagtaaacaacaacgtacacaataaaaagaaatttattgatgctctttacacctatacagttaatattgataagtggaaagccgcaaatgagctatgccgtcaaaaaggctggcagttcaaaatcgtaacagaagaatcactcaaaaaagtttttgggtggcgaggtcagtaatccctggagggaaacatgagttttatttttgagtttgagatcatcgcggaagaggataaacccaaagcaccacccaaacgcaaattgagtgattgggttgaactggggatcaaattccgtaaggcaagaacgaaaggtgtttctgctaaacgttttgccgattctgagggattaaactacgcaacgttcacaaagtcaatgcatcgttacaaaaaacagattgatgatgagattgaacgacgttccgcagagacagaagcccgtaaaaaacgtaatgactaccgtaaaaaacacgggatcgagatcatcaacgatttccgtaatagtctgaaaaagatcactgttggtgtatcagcggcaaagcgacagaaagattcaacagaatggtttggtaatttcatcaaaaccagtatcaaaacacaccgtgtggcaaaaccagcaacgggtcgcctgtacacgtttgcatatgatgcaaaatataaagacaccctgccgtattgggatagatttccactgatcattttcttaggatccggaagatcgaaagcgggtaacttagtgttctatggtttgaacttgcactatgcgccacccagagcacgacaggagtttttagaagagttattgaagcgagggtacggatccactaaacgcctctctaacaagactgtactcaaaattaactggggtaacgtgaaaggtatgcgaggcgcaacagaaatgatcaaagcatatctaccatcacacctcaaatcaccattagcagagattgcccctaaagattgggcgaaagctgtttggctaccgactcagcaatttatgtccaaagggaaaccttacggcgcgaaaaaagtctggagcaaatactaatcaaaaagccccaaccgaaaggaaggggctttatttttacaggatgctaactatttctgcaagtttgccaggggtcgcaccaggtctaactttcatagcatctttcaggtttttgtcaaccatcttttctgcatctttttcgttaaacccgcgtttcaccatcacagcaataactttttcgcgaatgcctttagccgcttcattcagatcttcggattcaaccagaactagtttagaaaccatatcgcctttatattcctgggtgaattttttaccagataccaggcgaggtttgccggaagcatcgactacggtaaacactgcatattcaccgcttgctttagttttagaacgcccagtgtacagaagacgcatatcgttgcttgggagtttgtaaactttacctttcaccagagcttcatccatagggatctcgatttcgaaatcttctgctaactggttatacagatccagattttcttccgcctcttcatacagagtagcagctttgaatttttctggtttgtcgaaatccagatcatcatccggattgccactgtagaaagaaacagtacctttagcccaatcgacataagccgcttgaactttaccagtagtcatacctttcaaacgtacaatgtttttaccgaagtatgccagatcgtgagaatccggtgctaaaacttcgaaatcagaaccatgtttgaagtgaagaaaaccgattgaatgtttatcggaagttttagcgcgttgaccacgtgctacggtacgagcgagggttttaccttcggtcagaaattctttgaattttttcaagtgagtcattttgtttttcctgatttccaatatgggaacatagtaccagtatttagtgacggggtaaaggaaaagttttcagaaaaagcataaaatttattagatctaattattgatcttcataaaaatttatgataaaataaaatattaatatattatagatcataaaatttatgaattcaagatcagatctaaaaatttttgataaattatttattaaattttacttgatcttgttagatctttttgataaaattttaattaataattattatagatcaaagattttaaaaggtcaagcattttttcaaatttttatattaccccgtcaggccgctttgatcccgttccccgctaaatagaggaaaggagatcctatgtctacagaaatgattttaaaccaaatctcacctacaaactttcgggttgatattcctgataacagttacatgaaaggtttgactttacaagttcaaggggttacactaccatcaatgaacctcccagcagttgatattcctgcaaatatgatggttcgaggtaaagtacctggttcggcttttgagtttgatcctttgatgatccgctttgtagtcgatgaggaaatgagatcgtatcttgggatttacatatggatgttgagcacaaacgattacaatgagtttaactctgttgcgtgggatgatcctaagcaatcattcgctgtgcatatcctggataactcccagatgaaaacgatcgccacatttagattttatggtgccttcccaacaaacttgggtgaggttgaattgggttatactaacgatagtgatgaagcggttacgtgtatggcaacttttggcttccttcatatggaagttgaaattgacggaaaagtagtcacttctcaaaagagaatgagctaatgatttatgtgattagtggaaaaaagcgaactggtaaagatacggttgctaaatttattcaagaggcgtacaatgatgttcagtgtgaagcactggcatttggtatcaaaagaacgctaagaatagcaatgcagcgatatggttacgataaaccatacattcgcaatatgattgaaggacaatattctgatccggatgctattttttacaaaggcgatcgagagaaacctcttgtgatgtctaatgaagatgttctaaatattttcaaaatcgggcttgaaatcctcaaagaacgtggatacaatattgtttatagtcctgatgatattgataacctgattatgagtaacgatactccctggagtatcagacgcttgatgcaagtgtttggaactgatatcgtatgcaagtatgataacacggtttgggttcgttacacgttggaaagattcgtcaataaatatactggtgacgaatacaaccatcttctggtcactgactgtcgtcaagaacacgaatacaaatacctaaaacgcttaggtgctaagtttgtgtttattgtaaaggataccggaattgttgatgaacattccacggaaaaaggtttgacacctcaacctggagatagtatcatcactaacgaaggtactttgaaacaactaaagagcaaagtgctcgatacttttaaattttaacaatgggtaataaaatgtctgatattcaaaaactgcaaaatgaagtactggtactgaaaggccgcgcattcgatctgaacgaagttatcgcgcaaaaagaaagtgaactctctgttcatcgtcaacttctgtccgacctgtgttcggtactgggtattgacgcaagccagccagtaaccccagaagcggtaattggcgcggtatccgctctgatcccttccgttgaagtcgaaaaagtcgcggaagatgaagccgcctttggcgaagaagcgtaaaaacaaatttattacaaaggggctacggccccttttttattggggtgttttatgaaatcatttcttgaaatcacaaaacctgttgtagatcctggtatctacatgtgtgctaaattcgatcaggcttcatgtgaggctttgaaaaatgttcaaaagacattaggtatcacaaagaatgctgtttcagccgaaaagatgcatacaacgatcgtatacagccggaaaacggttgatttgttcccgcaacaggacatcacagaacctgctaaactggttgatgttgaaaagtgggacacaaaatacggtagcactattgtagggatcctggaatctgaatacctgcatagccgtttcaaagattctattgatgctggcgcaacatacgattatccggattacaagccgcacgtaacccttgcatacgattcgatgcttgatgatatcagcggagtgaaaaggttgttgacactgcccgtggatttgactattatctgtgaagaggctgaatcactggatctggataagtcgttaaaagatattacagaacacattgaacagcgtggcgataagtgggttgttttgaatcacgatcgcacaaaagaacttggtgaatacaattcgaaagccgccgctgaaaagcgtttgcgtcagatcgaatacttcaaaaatcagtgaggattatatgaacagaacacgtttaatgtatcttgttaacagtgtacgaaaagaagttagcgaggcgtttactagcgcgttaggtgactggtatacaatcaaggtagcggctactgctgaccacatttcagatcgctttaaagaccgttcagtatcgattaaaaaagatattgaaacttatcgcgatatcatgatgagtctagcaaatcattattcgtgttatgttctaacctacgctgtgaaggccaaaacagaagggacacaggaagttattgtttatcgtcgggtaaatggtaaaatttttgcctgtcctatcactgttcaaatgttctttaacgaaggcgaagagaagccagtcatagctatacggttgcgaacagtgatccctgagtatgtttctttagctaacagaaaaacaatccaggtaaactacgttccaccaaaaatcaattttgaatatgacggttatcgtcgggttatgtcccgcctggatcgtctaatcgcttctaaagattgtcctccgcaactttggatgttgaaaaactgaaaaaagcccttgcattcgtgcaggggctttgctatattggccttgtcgaaacaaaggaggctatcatgaaactttactggttaattttctcaaacgggtttgttatgaaaggaagtgttcactgtgcaaaaaagtattgtgagtggaacaattgcactttcaagatcctgagcgttgcatcttctcaacctgtaggggattactaatgactggtgataagtgggttgataaaactttgttattgacagtaatctactttctggtaaaatacctggtgtagacaaaggagggagttatgagaaacttactgaatatcgcggaaatcttttgctatggtgtcgctgtgtatgtcctatttaacggtgacggcgcgggatactggatcatgttcggtggtggcttgttcctctctttcatcaaaaaattctttaagtgagaaatatatgatgcgctcaaatgtaccgaaaaacctgtatacagttattgatgctggttctatcagaattgccgatgtaatggcacttgttgaacgtttcgatcgttcgaccacgctgggacaactgctgagtatggttaaatcccagtatccgcacaaatgcccgaaatgcgagggcaaagggtttgaagtcaaacgcgtcaatacctatccgtccggcttaccggattcaggctgggttgaccagatggaagacttcaatgttacttgtgatatctgtaacgggcaaggcttcactacagatcgccttatcgcaaaacctgtcaaagtggaatatgtgaaagcatgaaaattaccgatctcgtaaaagcggctaatgcgctggtgacaagcgaacattacgccaactactgcgagcaataccctgttcccctggaacgcgcaattgctcaatccggttatgatggtatcagtaccgtaaccgttgaaaacctgaaaacgttcatcgtgtttgctaacacgttctggatgtatctgcccgataatatcggtattcgccagcctacattcttcacgctgtgtatgttctgcgaaacctatctcccagaatgcgaggattacgaagaacattatggggaataagatatcaatgggtaacaaagtatccctgatgcagtttgataaaaagctggggtttgcattctctcacggattcgccccagacgcggaaaccatgtttaaaatggctttcggtattgatccggctaccctcgatcaagaggtgttgtcagacatcaacaaaactggtacgctgtattatgcccgtctgtcaaacccagaaaacggcattcagtaccaatcgactctcgaaaaactcaaaactgaactgaaagaaataggtgaattatgacttctagcgctattcaacaaaacaatcacgatgtgcaactggcacaaatgatcaaagaacataacgcttttgcggcttctcgcgtcaatgaagaaagcgaacacacccgccgatctctctgggttgccatttaccgcgaagtgtttagcgagaaatccgctaacaaacacacccaggctgttgatgcagcagataaagcgcttgcagcatacgatcgcaagttcggggcaaaataatggaacggtctgctggtattctcttcctgaataacggcagcgttttaatgggtcacgcaaccgaaacgcctcattgggacatcccaaaggggcatatcgaaaaaggcgaagaacctattcaagctgcgatccgtgagtgcttcgaagaaaccggagttcttgttctcccgcacgaactggaaagcctcggaagactggattacaccagtaaaaaagagctttacttattcgtgtataaaggtaataattacccagaagccgataagtgtatctgtatgtcaacgttcgttaagaacgggcgaaccatcacagaaatggacggtttcaaatatgttccgtatagccaaatccgcgatcatgcgcgtaagactatgggacaacttctatctaaacttgtgggatatacatcatgaaagcaacaacttttcaaatctgtcaaatgatcctcctggctaccgcaacccgcgccgctgaacctaccgtgtatcagtcctggggtgattcattcaccgtgaaaaatattcgcgatctgcctggacgcctttacgcttcccctgatttcgaacccgtcgatccgaatgatttgacgctggaagaaatgaaaaatctgggcttccgtaagtggagcgacgattcaaacatgatgctgatccctctgtatctgttgccatacctgaaagacggtttccgcgctatcagtatcagcggtgaagaatttgaatttgacattggtgaagcagataacgatcatcgtatgggtctgttgtctttcgggtcattgcctaatgagtcacgttgatttcaacaccttatctcaattggggctgatctggaaaatcaataaagatatcctgcatcccctggggctggcgttgacgcgtgatcctgaaactggcgtatcggttggtgcgctggtttccgatgatggtgtttggtcgttcagcgaaaaatcagactttgaaaatattgcaaagctgaataaactttatgctttacaggccgaaggaaagctgttaaagttcctacaacaaaacgtgaaagagtgatatattatgaatggtgaacgtgtagttgttattggtaaatcaaagcataacgcgaagggtgatcacctgatcatcaacaacgatcgaggtgactggtacggcgcaacgaaagtaacgagtggttatgcaaccatcgttgaaaaagatgcagtacgtccggcaaccgctgctgatcctggttactatggaacccgtgaagagttcgaaagtgaaaatgatcaggagatcgcagaactgaaaaccaaagttcataacgcgcgggtgttggcggtgatttgccttaccgttgcggctatcaatactggtttgttgggctgggtggtgaatcatgtctaaagatgatattccggttcataaccgtatccgcgatcagttaacttttcgcagtcgcgatcacgcgatcatggttgggagttatctgcattggtggaagaataaagatctggatctgaatccatcttaccagcgcccctatgtgtggacgcagaaagagcaagatgcgtttctgactaccctgatcagtggtttcccttgcggtatcattgcgatcgcggttgatagtcagttcaacgaaacccattgggtagaagtgatcgacggcaaacaacgcctgacgacgattatcaaagtctacgaaggtgaaattgggattcctatgccggacggttcccgtttgttctgggacgaaataccacgacacgaacaacgagcctttgaaaacatttcattacctgccctggggctggatgaatgcaccaaaaaggatcgtctggaattcttcatcaaactgaacttcgcgggtgtgcctcaatctcaagatcacatgaaccgcgtcctggaaatgtataaggctgcaaaatgaacaaagacgaagaactgtatatggattcagcagaaccaaaccagtttatcatcggcaaagaagatcatgaactgttgcaagcggttaaaaacttgctggcgtatgctcatatccgcgtacctaacggcgataacgcaaaactggaaatcgcgtgtgctggttacggttacaccgctaccgctgataaaatcattagctattcagcatccagaacccgtgaactggttcattaccgcgataaattgagtgaagaaatccatcaaactcaggtaattgtagatcagttgccagaaaaattcgattaaagtgaaaaaaagcccttgcagcaatgcaagggctttgttatattacacacatcgaaacgaaacagagaaaggaaaacatcatgaacatgaacaaaaacattgccgctgtagttggttgtgaagtttctaacgcagaacgttatgacaacggtttctctttctgtgttccgactgaactcgatgcgtacaaagccgcttacaaataccgcactatgccgatggtaaacgttacttacgcgccgaacatcgaaatgtggctggttcaggtttacaacaaagtatgaacttccacgaacgcaaggccgcacgaaccgattattatatgcggttcgtgtatggctggaaattacggaaatgtgttgcatgtaatggatctgggcgatatgatagcgaccgatctccgaaatgcagttcatgtaatggaaccggaaaagaacgctttaaacctgtgaggaatatattatgcaacatgtgaatctcaacccaaaaatggaaaagtatctgaatcgccgtcatgacaaccagaccagtaaggatcaagaactggcgttcaatattgaaaccgccaaactccttactaaaatgtttcgcagattcccgaacaaggtcactcataccagtacccatatgcgcgtagaactggctgataagcgttgtatcatggttaggctggcttatgggttatcagaagatggttataacctggtgatgggttggacatcaatgatcggtaactatgttgaacgtaacgatatcgagtttaacatgatgcgcggggatcttttccagtgtccggtagacacaatccatatcggtagcctttacgctatccttcgcgcacaatatgaattatgggatatgaaatgaaattagaagatacgaaaattggcgctattgctgaggcggcgcgtaaagtctcttacatgatgggttctaaatggactgctgctgataatggttctattcgcggtaatcaagattacggattcagtgggaaagaatataaacgtgtatttcagtatgtagttccttatggtgatagtccgacacaggttaaaggatgggaaacggatctggggaattaccttgaaaccgtagatccgcaaactgttatggatctggttagtgacctttctatgtcacgtcataacgaacaaaaagccgtcaaagaggctgaacactggaaagcgaatcatgaatgtgaagtgtcccgcgcccgtgtcctcaaagagcgccctgatatgccactggagcgcatcaaagcatacgaccgtatggttgagttggagaaagagaacgaagccttaaaacagcgtatagcgagcctggaggatgtcgcacaaacccgtgttatgttagaaatgattcatagcatggtaattgacacccagcaaatgagccgcgaacaactgcgttactggcagacacatttccgcaaccctaacggatggtaatagcactttttgttaaagaaaccccttgccaatggcaaggggttttgttatattacacacatagaaacgaaacagacaaaaaggaaatcatcatgaaacttgttcgcgaagctatcaaacttggtaacgaatacaaaggtaaatggtactttgtcatttacgacgacaacgccgaaaaactggaaaaggttgaagatgcattacgtgctatggaaactggtgcttctgttggtggtgaagtgatgacctgggaaaactactgcgacggttgcccttgctatagtgatggtttcggatctggtttctgggttgatattgaagatgttccggcgttcaaagcctcctggaaaatcgctaagaaaatggtataattagcacgaattgctaaaactcgataaccctgttctgttatattacacacatcgaaacgaaggaggatatcatggaaatcatctacaaaagccggaactacaaaaaagaagatgttgctgcggtttacatcaagtaccggaacgtgaaatgtgagtatagcgggatctggggttatgaaatcgttgtcgaagaagtcaacgccgacaacaaaaccatttgcagtttcaccactaacactgatagtcctctgttcactactgaacagcttgaacaggcttatgaactgcgcaaccaggcttttaacgcggtacgtatcaaatgagattccgtccttatatagaattccttcgcggtatcagtgagatcctgaaccgcgaaataaaacccagtccgttagctgttgagctttacagactgaatgcaacccccgaagatgcagcaaaagattatggaaatgaactatgactactgaaattgatattgttgttgaacaacttgttcttgaagatcgtaaaataacactttcctattattcggaagatgggtatgaatcgtgggatgttacgttcgaaggttctgattttggaacgggagtttcctttagtaatgaagaaaaagcccgtgaaaaatataaagaatattgtgttctttacggaaaataaaatcgcttgcgttgtgtgtagggtaatgataccttacacacatagaaacgaaaccggagattgttatgttaacttttgaagagtacaaagcacagcgtgatcagttaagcaactggcacagagagatcggcagggagttgagcgcgtaccctaaaaatgaaatggggatgacgatcgaatcaatccgcaatacaccggaatacaaagcgaaacgtgctttgtgcaacaaagttttccaacagcttcgcatccttaacgggaagtacattaaactgtacaaaaaagaactggctgacgaacgtaaaagaagattcaactaatcttttctaatttccatcctacggtattcttagagatatcgtagggtttatcgcatgttgtgatgacttcacccagataggttttcagtttacgcatggaaatatttctgtctttgcaaaactttttacattctccttcaactaaaaattcttctccattaggggaagtaaatttccacgtaaccgcgcgggaattaccttttcctcttcttgattcagattgtgctttgcgtatagtatccgctttttcttctccgtgtatctctttataagaccgatgatcgttgtatcgtgggttgttctctcctttatgtgatgctataccttccttgaatcgccttttatgtgattctgaaattttctttgctgcatatttctggtgtgtttgcgaaatcttctttcctgtttctggtgtacatgaaaaatcaacactgttatgtatgtgtttgttataaaaatgtgggttcttgtctaccttatagatttcgtgtaaccttttctcaagtttcatcgccttttcccttgacaacccagatacgattactttatatttgtagtgtcctggattttccttctgatcttggatgaaatgactatcacgggaactactgaaatagtgtttccctaaatcgtcggaagcaagcattgactttttaggttttcttgatccataatagtgcttgttctctataacatttgtgattctgtaaacgtaatacattatgaggttcctatgagacacgttaaagtaaacgccaaacatatcaaaacgcctgttggacttctactggaagcgaaaggaaagaaaatctatcgttccgaagaggttaattttaattttgatatgaaaacaggtcatatgatgacttggggaaaaactcctgctgacgatcctatttatagtcattttccttttatcctcgatatcgagatcacaactaaatgcaatggccctgctggtaaactttgcggtttctgctacaagtctaataaccctaacgggttcaacatggatcttgccaccttcaccaaaatcatcgacaaaatgccctggctgactcaatgcgccctcggtgctgatgcacaggggcaaacaaaccccgatatgttctatatgatggcctatgcgcgttctaaaggcattgtgccgaaccttaccattgctgatgtatcaaaagacgttgcagcgcgtttagcggcggttgctggggctgttgcggtatcggtttataaacacgctggctttgatgtcgctttcgactcggtagcgaacctgacagaagccggacaacagcaaatcaacctgcacttcatggttagctcgaaaacctatgatgatgcgtttaacgtggttgatgccgtgaagaatgatccgcgcctgaaagaagtcaacgcgatcgtgttcctgggactgaaacaaaaaggacgcggtaagaactgggacaccgttacccgcgaacaatataaaaagcttgttgaatattgcctcgattctggtgtaggatttggattcgatagctgttcagcccccgctttcgttgaagcgatggagggacacccgaacttcgaacagtacaagcaatacgccgaagactgtgaagcgacgatgtttagctcgtacattaacgagaaaggcgagttcttcccttgttcgtttaccgaacgctgggttgaaggtggttgggaagaaggtttgaatgtcctggaagcgaacgatttcattaaggatatctgggaacatccgaaaaccaaacagttccgtaatgaactgatcggtaataaggatcataacggttgtcgtaactgtccggcttatgcggtatgcggtaaagatatgcgcgtacacaaagcccctgaacctgatgtttacgcggtggaattgaaatgaaaatattatcgtacaacacgcgacataatcgcttagttgctctggtatcagatcgggaagcgtcactccttcagcgtttcccgactgaagaaatggtactccgtgatattgacggatatggaaatgatgatacaatgatcgcatcaagcatcaaagttgaatcggtcgatatgtgtcacgtatcaactttgcttgcataccgtcattatgttgaagatggttcacaacacattttcgactttatcgctaaactgacatctagacttgatgaagaggaatactatgatttattcggataaacctactcttcgtcctgttcctgtaacagttggtattgtgaaaccgcgaacgttggatagtttgatcgacaagtacagtatgatgccaatcaacgcgcaatccgcgcaactggcactatcggaaagagacgctatttgctgcgagtgtgacattaaaggttttcatacagaagaagatcttgtaatgatggattacctatggcacattcgtaatgaagttgttacttatatactggcgtcggaacgagcaggacgcgctgtagcagatgcgcatagagaatcacagaactacattcgcgggttatcagcagtagaacgggaggcgttatatgcaagaaataatcgatgaacttatgtatgtgtacaaagagcgatgcaaaaatggacgcatcaccgaaccaaaggcaaaagcgattattgaaaattattgtgcaaaagtacaagcacaagacgctagttcaaaacttctgaacagtctgatgatccttaaacttttgattgcatccggtgatgatatgccgtatgatgtagatagtgcagaagcattccagaaaagttatcgttcatggggagtgatttactcccgctcactgggttcttatgattcggttatgtggaacctgatgcaccttgataaactgatctgggaagtgctgaaagaagagggtatatcatgacatttactcataccggaatggttgaaacgataacagcaggtaagaagcgtgttcccctgatgaaatcggggaaatactggaagagtgaaaactataaatttgatcataatggtaactcatttggttctttttatgctaaactacacctgaaaaccattaaaccgatttaaaggaaactctatgttaactaatgaacttagtggggccattcgtaccattgaagggatccttcatgatttgcgtatgggtaacgaaatttgtgtaagcgacattgaagcaaatctggttgaatggcgcggcgctctgtatggggcaacacaaggaaaagatccgttgtttacggaatatgatatgtatacagtaaccattgacaataaaacttatcgttttcagtggcctgatgatgcatacgaccatatcaaaacattttacagtactggaggtgctctttttgctaccagtattggtgttaacgaattgccttttcatcctgatggattgagaccttccgatcatttaggatgtacaactgtgttactgggtatgtgcggtaactattctgatcccgtgtactggattgaagccagtaaaaccaacttaaaaagagtttaacatgaaatatattattgctttggtgttagtcgttattgtcgttttagcacaatccggatgcaccgatgagaaagaagccgaacgtattctgactgctaacgggtttagcgatatcacgtacacaggccacgcctggttcgcatgtgatgagaaagacacctacgcaacagggttcgttgctaaaagccctacaggggtgaaaattgaaggtgctgtgtgctctggactatttttcaaaaatagcacaattcgcttcaaataagtgttgacgtagatacggggttatgagactatagccatgtcgaaacgaaacaaactttaggagagaaaaatggacattatgaacgaaatcttagctcacatcgaagccaacaaagaagcaatgaaagctaaagaaggttgggttgttgttgttgattgcttcaatcctaatatctggactccggttttcatcgatgagaacggtaacgaagcccacgggttctatgatgctgcaatcttcgatactgccgaagaagcatgtgatttctgggcctacgttagcggtgatgctccatttacaaaatacggtgtgtgccgttgctgtgaactctaattaactagccccgaaaggggcttttttgtaggtaaaattatgattacgaaagcacaaaggatcattaaccatttagaaacagggttcccgtaccagggagatttaacccgcgatattattgatatcctttctgaacacgacggcatgaaggccgaaatagaagaactgttacatcctgatgctaacgtgtttgcttcattgatgagcgatgtagtgaacattgacgccgatgaacttggatgcattgaaacaacaaatgatggtgataaaaccatactgaaacaggcgtgtgaacggatagacaaccttcacgatcgtttgttcactctaacttttccgtcaaaaaacgataaaccttgttgacatccagaaaataaaccagtagtctgtagttacaccaattgagaggaatatattatgaaaagtgcttttgaaaaacgtgctgttaagaaagatgttaaaccaggcgcgatcatgtatgaagtattttgtgtgaatggcgaaaaggctgaaatgggtagcaagatgattgttactggattcccgtatatgcatcgcggtattgggctgtttgctaaatgcatcaccatgtacaaagactgggactgtcacacagagttctctcttgaagaccgtagtatgaatgggcgcaacggatataacttccatgctttcttcctgaccaaagaggatgcacaggcttacattgatgaagtcaatgaagaccgtcttcctcctgatatgaaagagcgaaaagaagaacagatgaaacgtaaacgtgaatttgaagaatgcttcggtgatctttacgattattaattatcgaacctcttaaaccataaataccctgtgtacccaaacagggtatttttacaagaggtgatttatgtttaaattcagtcaaaaaagccttaacaaccttaaaggtgttaaacctcaactggtgaaagttgtagaacgcgctctgcaactgtctcctgttgattttggtgtacgtgaaggtctgcgtactgtagaacaacagcgcgagaacgtccgtaagggtgtatctcaaacaatgaactcaaaacacatcacgggtgatgctgtggatctgtatcctagcgtgttgcctcaaggctggcaaacaaaccctaaagtgtggttgcctgtcctgaatgctgttaaacaagcaggtgatgaactgggtgttaaactgcgttttggtatcaactggaaaaatgatccgaaccttccgatcgaaacaaaattcattgatgccccgcatgtggaattagcgtaacaaaggggctttggccccttaaaggtaaaacatgaatagtgaattttatgtaaagacaattgaagaatgtcgtaagatgcatcttatgcgagagttggaagaaccaacgcataattacggccctaacgattttatggtattcgaaaccaggctggatctgggcagagaaacgcaaaagactaaaggcgcgtttgattttatgaaacgttcccatagttcccttaacatttacgtagcgcatacgttaaatgcagcacaagacgccaaacagctaaatggtgctaccggatgtgatgtattgaccagtaaaggggcaattcttaatcatttccgtggacgtcgaatagagcaccaggcaataaaccttatttttgatgagtgtgatcttacgcgcaatgaacgcatggacattgtgtataatacactcatgcattgtgtacaaaagaaacatccattagcatatattcacgtaatttcgctgggtatgtaatgaaaagtcatggctattcatcaagaaccatacatgaagagattcaagggatcgaatctcttctgaattttgtagatgttgatacatctacaggtaaagtgtattggaaagttcagcgcggccctatgtctcctggaagtgaagccggaagcaaaaacgagtattcccaaattcattttaaaggttctatgtatttgcgacaccgaatagtgttttacgttgagaatggttatcttcctcctatcgtagatcatgtatatggtgttgagaatggagatacagcaagaaatttacagaaagcgacgaaccagcaaaatgcgatgaaaaagaaatgtaactcaaacagtagtacagggttgaaaggtgtttcttatcataaagccaatgggaagtacaaagcgcagataaacatagatgaaaaaagaaaatttttggggtactataacactccagaagaagcaaaatccgtttataaccggaaagcaaaagaggttttcggtgcattttttaacgaaaccacataaggttaatgtatgtcaaaatacgtattagacaccaatgttttgattagtaacccctattcaatctattcattcactcaacctggtacagaaatcattattacctctgctactatgggtgaattagatcacctgaaaacgaaagaacgaacagcgcacgaagcacgattggcgatccggcttctgtcaaaagttattttcggtcagtcatatgatgcgattacgaaatcaggtattcctttaaacctgacaaacccagcactgtctgacactatcacccttaaagtggttgattatgtcggaaacaaaacgtttgctcttgacaagcaagacgaacgaatcattgaaacttgtatgcaacaggatgcaaccttagttactcgcgatattatgatgttgctgatcgcaatgtcccgtgggtgtaaggtagaacagtatactggcgacgatacgttaaaagatagcgatgtattgtattccggttatgtagagatccctgatttctgggatactgtggaagtgttgggatatacagataatgtagcccaaatcacttacagttcgcttcctgacgaagatttttatcctaaccagtacattacctcaaatggtgagttagtcgggcgtgtggtgactgctgatgagatttgcttgaatgtcttacctgttaagcacgaacaggctatgaaacgcaaactcatgaaagctatccagccccgtgattctctgcaagcggctttcgttgaatccattatgagcaatgaaatcgatgttgctaccattatgggcggcgctggttctggtaaaacaatgcttgctgtttccggtgctatgcacctggttaatagtggacattacgctaacttgatgtatgtgaagtcagatagcccgttatcaagtgaaatcggcttccttcctggtacattgggcgaaaaactccggccttctatcgaaccttgtattactagcctgaacattctgtttaaggataatccggaatctgaaaaatacattgaaggtttgattgaaaaaggggtggtgcaattccctagcctgtattacttccgtggtcgcagtatcggacatccggatccgggcaaaggttctgtgctgattgttgatgaatgtcaaaaccttagcaaccacgaaattaaatctatcatttctcgttgcggagagaacacacttctgatactatgcgggaacattaagcagatcgacaaccctcgaaacactgccgttaacaacgggtttgtatgggctgttgaaaagctgaaagaatacgaacactcaagccatatcattcttgatacagtgtatcgttcccgtctcgcggcgtttgtcgaagacaatttctaatgatgggggcgaaagccccctttttgtgaggtgtatatgattactgttatccatagcccaaaactgattactgtttgcagttgctgtaaaagtgggttagaatatgaactatctgatatacagcaaaagagagaatcgatttacaatggatttttctctgctgctgattatgtcgtgaaaaaatttatcacatgtcccaaatgtggtaactctgtgaaattatttttgaattgaggtttccataaatgaaactagaaaaacgttattatgtagcaaaattgagcgatcttaaagaactgacgccagaagatttgaaaacgttcaacgaaatttgcacgaaaatcgaaatcgggcgcgggatcaatggtaagaacccatttgatgcgatcgtgatcgagaatgattggcccgaatacgataaagtgttggaaatgctgacttctcgtattgttcgcgaagaaaccgatcgcaagtttgaaaagatgctggacaacaaagaacgcctcggatactttttcgtcgtggaaactcaccaggggacttttctgatcaccagtgatgcgcacagcacaaatcgtctgacgaaatacagtgggtacaaataccgcgcattgttcagccctgattgtggatttgacaaaagtgagatccttactactagctggagcgtctactttaaacatgccgttatggtatcgttagatgaaatcattgcactatacgatcctaacgaggctatttcaaattataacattgctgagtttatcaacgataaactacgtgacgcgaaaactatctaaaatagttgcataaatataaagtggggtgtattattgccactctttttgcaacataggtattaaaatgaagaaaattattattgctgccagcattttcttgtgctctttttctggcaacgctgcgacggatccgctaggggatttcattgcggatttgcctactcatcaattgcctttacaaaaggctactgtgaagcctccggcaaacaaaaattctccatcctacatcaaggatttggataatatcacaccgaagcagaaagaggttttggagtatgcttatcgagttggacacaactatgatttgaagactgcaaaacctgtagaaaaagataaggctaaacgtttaggctatcatttagcggctattgtctggatcgagtctcgcgcatgtgagaatgtcggtaaaggtaaaaaaggccatcacgcttatggatgctggcaagttaccgcaaggagcgccagcgcacgaatggataagtcatatcctaaacgcgtagtaatcaaaaagctcgaaactcttcaaggtggatcgaagtatgcgatctatgaactggagtactggcttgattaccacaaaggcgacttgaaaaaggcgcttgcgagctataacgctggtttcaagtatacaaagaaagaagcccgtgattatgctcgtatggttaatacaaccgcgaagctgttagaagaaaaacaaatcatttgacaaaaagcccttgacttcggtcgggggcttttttattatgagtgcatctaattgagaggaatacattatgagcgtttcacatcaagtcattgtttcacaaaaatatgattaccctaacctgttgcgttgtgtgcaagcaatccgcgatcattttagcaaacaagacaacatcgttatcaaagagattactttgagtaaatctctcgattgttttaacatttatttcacatatgataacgaacagcgccgcctgttcatttgtgaactcatggatatgtattatgatatggaatacaatcctattcctaaaaatgggatttattttagtatcaatgtctggggagaatcacagaaaatcatggatcttgtgaaagaaaccgtgtacactgtcattacaagttcggatactgtgtatgagcgcccgaacgatgcttatgaatcacgattcactttggttaaatgaggaatacattatgagcgacctgatcctgaacgaaactaaacgcgtactgtttaaagctggttcctacatcgtggcgactccgaaaggcaatacttcccattgggcggttgctgattggatcatgtacattgacaaaaacggggaatgggtacaatgagaaacttagcgttcgaagtgaccgtaattgatcaacggataaaagaacttcatgcacagatagccccactgcaagaagaaatttccacgttgattaaagagaaaagagacctgattgaactcatcgatcaggatatcattaacaacgtcaaggacggggaaaagatccccgtgatgttggaatatcgttcttccagtgtgtcttatcacgcggcaacaaaatttttcgaatctatcggtctgggtatcgatggtatggatccggacattaaccaatactgtttgcggatcgcgatggatgaagacggttcaaaccttaatcgagttttaaccgctttagaaatggttgaaccttttgtcaggccgcaagcaaatgggcgtaagcgtttcgatctgttcgaacatactctgtctgaatgggattgttactggctgacatacaatccagctaacaaacgttgggctgttgaaactggtagtgggatgagacgaaaccaggatccgacattctcggatatgtctctgaaaaaagttcttgcgtatatctgtaatgcgcattattatactcctatcgaagaggatgaataaggaatcatcatgaaaaagttagcactgcttttaactctggttgctggatttgctcacgcgggtgatgctcgcctggatgagttatgcaacaatcgtgatatcaaagatgtcgcagtatgtaagcaagtgatcgcagaacagttagatgttgcttatatgtggggagaggaaaatgctcacctgtataaacgcggtaagttgctgaaacaaaaagagtttttgcagtctgaaccaatgatgaatctatgcaaacaagcgccaaataaggaacggtgcgaaaagttccgtacttatttggttgacgaattcaatgctggcataggactttactaatggctatctggatttttattattatggcggcggttgtggtgttcttggcgtacaatgctggtaagcatgagagcactgggccttgttactattgcggggatgatgactatgtttagtgctggatactttataggcgttgttatcggttttataatttttggtggtgttttatatatgtgtcatcaagaagatcgccgccgtgaacggaaagcgagaaaatgagcgtaggggttcaattcactgtattgtggatccttgtgattttgatgggccttgttgtggccctactatatcggaaaaataaaaatgatcattaaagaagtgaaaggtaatgctgtcaatatgtatctgaacggtgaaggccatttgatccacggatgcaactgctattgcaatatgggcgctggtattgctcgcgaaatccgcgatcgtattcctggtgcatttcaagttgatgccaatacgttaaaaggttcccgtgataagctcggaacttgttctgtttacattggcgaaaaaggcaacattgttttcaatgcatatactcaatatgatttctggacacctgggccgcgtgtcgattatgacgcaatcggcaatgcttttaaacaggctgtagggcttgctgacgccgttaagactggaaagcctatcatcacacctttaatcggtgctggcctcgctgggggcgactgggaactcattaagcgcattattaatgaggtgactggtgattacccgatcattgtcgttcatttcgatcctcgtaaggcgaattaatcatgatggatcctatcaaagcaggtcgggagattaagaaagcgaacaaacggatcgccgtaatcaaaggacaacgcgccgcactggttaaaacctgtaatgcattggcgcaagcgatgaaagcgaataacatcaacattatgcagcgtaaagaaactgttaatgttctatgtatcgttgacaattgtctgagtaaggaaatggacgaactgaaaagtaaaatcaatatgtggtatcttgatatacatcaagcacaagataacgaaatgagtggttataatcatgactgacaaaatcaaagctaaagcaatgaaggtgattgcgacatatggaacactccgttggtgcaacgcgcaggtgtgcgggtgtatgggttgcgcaaatcataccatgacgaaagaagagtatgacactgcgatccggatgccagaaatcaaagagtatcttgcgcgacataatgaaaaactcatgggtaaaggatggttttcaattggctaacgcacacattatagaaaaagttcgttgtcgggattgtcatttccctttaatttgcgtaatgaacattaccaaacccccttatgatgagtgggattggtggatctactgttcaaacaaaacatgcaaaaaccatgaaggggaaggaaaattccagaataccccagattttgttgagaggataaatggctaaactgtattttcattatgcatcaatgaatgctggcaagagtgctcgtttactcactgatgcatacaactaccaggaacgcggtatgcggatcctgatgtacaaaccagcaattgatacgcgagaaggtaaacatagtatctcttcgcgtattgggttggaagcaacatgcaccatgatcacgcctgatatggacttgtattatgatgttcacaacaatcatttttacagtgatagcgagaaactggtttcttgcgtgtttgtggatgaagcgcaattcctttccaggaaaaatgtcatggatctgtgtcgggttgttgacgaattagatatacccgtaatgacttatggactaagaaccgattttcagttgaacttgttcgaaggttcttatatgttgctggcgctggctgatgagatcagggagttgcgaggggtttgtcattgtggaaagaaagcaactaccgttgcccgtattgatgcgaatggcaaatttgttgctaatggcgaccagattgagatcggggcagaagacaaatatgtttcactttgtcgaaaacactacttgcaactaaagaacaaccctgatacagtggaagcataaacaaaaggagatcattatgagtcgcacttaccgtaagaaatacaatcctcttcgtgaccgttcatctaacgaaaagatcgaagaagtaaaagagtattctcgttattatgctcaacatggtattgatccggatgggttacgttggtactcaaccaactggaaacacaaatcaggatgtgcatacattcgatttgataataatttgtgtcgcgacggtaacaaagctcatggcgatctgaacgcaatgctttctattgcagtaaagaaaattgattcaaaagtacgtacccgtttacgtcaggaactgaaacgtatgaaagctggtgtgatcggttgggatgaaaacgtagaaaacgtgaacaaaatacgcgctttcgaaagaagtttgtgttggtatgacattacttgattgactttacagcaaaaatattataacgaggcttcggcctcgtttttgctataaatatatacaggagtagacctatagtgggtctatgagtaaaagagtaattgttatgaacattaaacgcatatcaatggctgtgctgttcggattgttgatgatgacacccacaacacacgccgccgaccgtccggttcagaaagaatttgacgattatatcaatgcggcccttcaagtatacatcacaacgatccctcccagcgtaaatacaagcgaactattctacaactacatggaacgaaaatggcgccaaaaacaatgccgatctgaatccgaatgcgcaaagctagggattagggtcgcgtatgagtttgcaagtatccatcgttcataaagggatcatcatgcaatcatttaaacaaattacagaatctgagaactcaagcaagatagatgcctttattggcatgtgccttatgtccgttacctatatgcatagcgcacattttgcaacaggttcatactcacaacataaagcatatgagggtttttacgaagatatgcaggatttggttgataaattcaccgaaatccacataggaatcacgggaagatacaaacctgtgctaaaaaccgaaaatgtgcttgacacggtggcgtatctccgtaaaatagccaacgaagcaaacgagatctacgaatcagtagatagttctttgaagaacatcctggacgagattaagggcttgtgctatcaaacaatctacaagctgacaaaactttcttaaaaatagtttgacagcgtgaaatgtgatgatagaataactatcgaattgaacaacaacttatggaaattatgatgaacttaaacactatcgtgaacaacccgaagaaaacctctctgatcgctctgggcgtagtcgcagcactgtggttagtgcctaacatgtataccattgtgcaagacggtacggttaaaactgaaaccttcatgggtaaagtatcaccaaaacccgtactgcctggtttccacattgtaaacccgctggcaacgtttgatacgttcagcaccaaagacatcgcgatgaagttcgacaaattacaggttccgtcccaggataaatttaaatccactgtggatatgaccgtaatgctgcaattcgacggtagcaaagcaccgatcaaccgtatcaacgcgggtaatcaggatcaggcactggataagtatgtaactgaaaaactgctttccactgttcgcgaatttggtaaatccgtaccaaaagcgcaagacctgtttgatgcgaagatccaaaaccaactgcaaaccgcaattcagcaggaagtagaagattatgcacggccttacggttacactgtgaaacaggtattcttgcaggatatcaccctgccggaagttatcatggaacaggtaactaacacgaagatccgcgaagaacaggttaacgctgctaaagctgaactgcaaaaagtagaacagacttcattacaagcagtaaaacaagcggaagccgatcgccaggcgcgtgaaaacgctgcaatcgctaacgaacgtgatgctgatgcccgtctgtatgcagcgaagaaagaagcagaagccaacgccgccctgcaacgcaccattacaccggaaatgatccgctggaaagaactggatgtacagatgaactactctacccgctataaaggtggcgtacctcaaactgtaatgggttcggattatgcgggtaaagtgattttcgattctcgtaaataatgttttaaagccccctctttgggggcttgacatctaaaacgagaatactataatgaacataaaacagatcgtattgacaatactcatttcactattctttggtttcattggtggattgtttggtgttttaataattgcgtctgttttatgattaacctttaaacgtggagcacgttatgaaacacaaatatgataaagctgtagtaattggacgttttcaaccttttcactatggtcatgagaaaatggtaagggaagcccttgctgttgctgatacggtttacattctgatcggttctgcttatgcatatccgaacacattaaacccattgaccgctaaacagcgtcaagcaatgatcactcgctggtctatctgcaaacttgatgttgaagatgcagccagaatcaaattcgcgcacattccggattacctctataacgaggaaaaatggaaatcccgtgttcgtatggcaatcgatgaaactcgaaatgatcgaattgcgatcgtcgggtacgaaaaagacaaagattcttactggcttaaagcattcggatggaatcatattccggttgaacctgtgaaggttggagatcaggatctgtcctcgaccaatttacgcaaaattatctgggaacatcatgaaggctgggacgaagatttgttaaaatatgcgcctagcactacggtttcctttatcgatgaatggacacaaacaaaagaattccagcgtttgtcccatgaagatgcacactggcaacgagagattgacaagttcaaaaaatatccgtatccggattctctgaactgttgcacggctgattcagtggtcgtatgtaataaccacgtgttagtaatccgtcgtaagtttgcacctggtaaagatgcgttagcgcttccaggtggacacaaaaacggtaacgaaacgttccttgattgtgcgatccgtgaattgctggaagaagtacgaattaaagtaccagaaaaggttattcgtggttctatccgtaattcgatgctgttcgatcatccgaaacgttcggtgtacttctcaaaaccgactgtagcacaatatatcaagctcgaacctaataacgatggttcattacctcgtattatgggcggctctgatgatgcagcagacgcgttctggctaccgatgcacgaagtgatcgcgatgcgggatctattcttcgatgatcattatcaaatcatcgtagcatttaccggaatttaaaacaaagcccttgacttcggtcaggggcttttgctatattgggcctacagaaacaaaagaggcttattatgaaacatccctattgtcttgttacccgtccgatttgtccaggtgggttgcctgttgcctgttggcagttgattgaaaagggtgatgcgtttttaaacaaacgcggtgagaatgttttcgtttatggtgttaactcaatcgataatgaaactatggttatcaccgatgagaaaacaaatgaaaaatatacgttgacatccgaacatgattgtcgtaattttaacgtatattggaaatctgatgaagaatttgaaactgtgaggaaatgattatgatccctgttattagtgctcgtgaacaagtagcaaaaccccgtgctgttaaagttggtgattttctggacgtgagttttacctgtggagaaactcagaagcaacacaaagaatctttcagcgtgatccttgtatctaaagattctgatggttcaatggtttacattctgcataaagtaggaaccgcccgtgttcagggtcatgtaatgattatctcagtatatcctggcggagataaagtatcttctcagtgtttagataaagtggctgctcgatatctgagagatagtgttttcatggcggagattagcaaaatttatgttaattctcgttctgctgttgatggtattgttacccacgtaggtgatgaattagtgttcaccgaaaaatctcatgaatcggttagacgtgctgttaaagttggtgatagactcggaagccctcgccgtgattatgtggttgaatacatcacctcttctggtgatatcatcgtgaaggcagaaaaaggttctaccgttgttatttccagacgcgataaaaagctgattgaatcactcaatcaggatctgaaatggatcgatgaatcagaggtgtacgctgcatgaaacctcgcttgattatgtcggatatagtgattgtcaacaacgaagaatattatgttgcagacattaacacgaagggaacccgcgagattttggatctggagtgtgttaggggtggcgaaaaccgattcgttgtgataacatacaacagaagcagtaaagaaacgttgggcgtgtctgttcccgttcactactgtgaaaaaactaattgctggagacgtaaatgattgatttaagtgatgtgaaagttggtgatacgttgtatgatgctgggatccgtagtgaccagcgacaaaatcgcaaccccaaaaccctttacgtacaaaaagttgcgcgtcagtacctgtatgcatctttccgaccggaagatgggtctgattgttgtactaatattaaaatcaagcgcaattccggatgggctgaggggtggatgggttatcaactgtatcgtagcgaagaagaatacaaagaaatggtgtatcgccgcgatttgtgtgataagattaaaaaagtatttgggaatagctacggaacaaacattccggatattactaccgctgaattgcgcgggatcgcaaaaacattaaaggttgaattctgatgaaaatgattatggaaaccgtattcggttctcacctgtacggactggaaacaccaacaagcgataaagactacaaagggatctatctccctcatcctcgcgaaatcctgttaggcactgcgaagaagtctattgatacatcaactggcgataaaaactcaaagaacggtgttaatgacgtagatcgtcagatttacagtctgcaaaagtttatcagcctcgcatgtgatggtgacaccgtggcgattgatatgcttcatgcagatgatagcaaactgatcgctaactctgatatctggcaatatctccgcgctaaccgttcacgcttctacactacggaactaactggtctgtttggttatgttcgtaagcaagcggcgaagtatggcgttaaaggttctcgcctggctgcactgcgtgaagttgttgatgtgttacaaatgattcccgattactggtatggtacatcattgctgggtaacgtggatgaatctaattacggcaagcgcatcaaagttggtgagatttctaaccgattcccgaccaacgagttttgtcgattcgttacagacaaaacactgaaatcaggttgtcaggaattttatgaagttctggggcgtaaattccagtctacgatcaccgtagcggaaatgaaaaaatccgtgtataaactctgggatgaatacggggaacgagcacggcaagcagaagccaacaacgggatcgactggaaagctctttctcatgcgttgcgcggtggtatgcaattgatccagattttcaaagaaggtgatattgtatatcctcttccggatagtgcatttttgaaaatggttaaagctggcggtgttcctttcgcaaccgtacaagaggcgctagaatcaacgatgtgtgaagttgaaaagctggcggctgtatctggttatccgaaagaagttgatcgcgatttctggaatgatttcattgaacgtgtgtattctgaacatgttgtgaggtactataaatgacatatccgaaattatctggcgctgaaattgatgttctgtgtaaactttacggatactcgtcaaaaatgttggatttagatttcaacgatgttcccagtaaatcagggcgtgattccctgattcaaaaaggttacgcatcaatggcgtttagttcaccaacgaaaaatactgatatgtgtttagtgatcacccctctgggcgttgacgcatacaaacacggaattgaaacggagtggcgataatgggtgatgttattttgaacgttaaagatgtagtattgggtgatactaaaaccctagattcggcaatggaaaaggctgttgttaaaattatgcgcaatagcctccgcctggaagttaacgagattacagaaacttgttatacaggtgggctttgtggtcaatctctttatcgtgatgcaaaaagtgtgaatattcagctatgggctgatattggcgaagaatcatacaaaatcgatgaggttgatttcgacgtatgaaaataattgacctttgcgctggtgttggtggcgtgaggctcggtttcgataaggcattcggcggggtcgaatgccttttaacgtctgaaatcgataaacatgcacaacaaacatatgctgataactggggtgatgaaaatattcagggtgatatattcaccattgatgaaaacgatgtacccgatcacgatatcctgttggcggggtttccttgtcaggcgttcagtaaagcagggttaaaacagggcatgttagatcctcgcggtactatcatctttgaaatactccgcattatacgggctaaaaagccctctgtgctgttctttgagaatgttccccagctattaacccatgacaagggcaacacgtttaaaaccatctacaggctgttacaggacgaaggatacgatatccattatcaggtaatgaatacaaaagattttggattgcctcaacgaagagagcgtgtgtttattgtctgctttcgcgatccggtgttctttagctttcctgttcctccacgtaccccaacaagggtcggtgacattctcgaaccggataatgatcaatataccatatcagatcgtgcctggaagggctttagagagcgtaaagaacgaaacaaggcaaacggcaaggggtttggctatcaggccgttacagttgattctgtgtgtactgggacgataacagcccaatactataaggatggtgttcaatgtctggtattgcaggaaggtaagaaccctcgaatgttatcacctcgcgagtgtttccggttgcaaggatttcctgattcattcaagatgcataagagcaaaacacaggcgtacaaacaagcgggtaactctgtatctgttccggtgatcgaagcaattgcaaaacaaatcaaaaaagcgcttgcataggataacaaagaatagtatagtgaccttgttgaaacgaaactgacaaaaggaacataccatgacttttaatgacctgtttaacggatgtactggtgctggcgcgaaattcaatcttctgaaagattacccgctgggttctaatcctggttatgtgatggttgaagttcgcaacggtgaatactataacgtgttcatgtgggatcgctctttctcttactgctggttcggtgcgaaatataaaccagattacattctggagcaaatcgaaacagtgaaagctaaaaatcctgaactgtatgcattcgcagagtctattcgtggtgtgttcgggcattaattaaacaagccccgaaaggggctttttcgtgaggtttatatgattaccgaagttattgaaatggttttatacgcgttaacttttgtcctcttgtttcttagtgcggagtggactagtcgctgaaatgtagtaatggcccgtatttgtgcggttgctgtgttctggatcctgggtttactgctggttagcatcgttagggggtggtgatgatttacgtagcttcttatagtgctgattatgaattcactgaaattgcccatgtttctgaatcattgcaaaactgcgttgatgcgctgaacaaagttcctaatttcccttatcttggtgatcatgttactattgatgtatgggaaaatgaaaaaatcattgcaaaaagttcaacattcgggcatcgcgatgtatgggatgatgaatcactacagtacaacgaaatccccgtaacttttgaagaggttatgaaaaacatgaaggaagtgaaagatgaacatctatagcattgagttgatttttgatgaccgttttgagcaaacgtctgattgtgtatgttctactgttgacctgaacgtcgcgatcaaatacattaaacatacaccgcttccgtcgttgcattactattgtgtaactgtgtttgacgggtttaccggaaagcaaacgcatcgttgtactgttgggtatgacgaaagaaaacatttcaccgcttttgaatttgaggaaatcaaatgaaaatccgttctggttttgtgagcaatagttcatcaagtagctttattgtacggttcccgaaggatccgactgatatcaacaatctccgcgaaatgatgggtgattgtgttcctaactgtggttatagctggatgacttgcccgacagcggaagaagttgtacagcaagtacaccgcgacctgggtggtcatatgggtgatggtttcgaatcatactatgatgataagcgttatgaatgggaaaccgaagatagcgcagaaactcgatatcggtctaatcctcaaattgcgcttgcttatgatgggcgtgactggtatgatctggaaacagaagagaaagacgctctgatcaagatgtggttgtatgaagagtacaacgctaaatttggcaatcagaacggtgtattcatttatgaatttacttactctgatgaatgcggagaattccaatcacagcttgaacacgggcaaattttccgtaatctggaacacactatgaagagtcatcactgatggaatacgaaatctgtgtaaaaatgcccccctatcaactgggggaagaaataacgtttagtcaaactctaccagtaccgattgatttattttctttgcgaaaatatcttgaacggttcgatctgaatgagtatactattcaaatcgtaaggattaaaaatcctgttgcctacgctctgtcttttgacgttggcgagtctcaaacaacaacgatggatgattttgtttcattgttgagtagtaagtttggatgcgatgatgcattagatactattagcaaaaaagtaaacgaaattttaataaaatttacctataaatgagaaaattatgatcactaacattgaattcaaaaacgccgtagccaaaccaaccccgactaaccacgtttttgtttgtgacgtatccggatcgatgtataacgaactcccgcgcattcgtcagcacctgaaaaacaatctggcaacgctggttaagcaggatgataccgtatctattctgtatttctccagccgtggtcagttcggttctgtattcgtgggcgaaaaggttagctctgtatccgacctgagcaaaatcaatgatgctatcgatcgttatctgcgtccgaccggatgtactggcttcgttgaacctctgcaactggcggttgaagtcgctaccgatctgcaagcggataatggcaatctgaacagtctgatcttcctgactgatggttatgataactgctggcgtactgatgacatcctgaaagcgtgttctactctgccgttgacgtttaacaacattgctttcctggaatatggttattatgtaaaccgtcctctgctggaaaaaatggcggaagcaaccaacgcattacacaaattcgttgaagggtttgatgcgtatgtacctgcatttgatgaaatcattaccgcgcaaacctccgcacgtgttgaagtcaaagttggcgatgcaactcatgcgatctacctggatgaaggccgtgtgtatgtcctgaatgctgcaaatggtgttgttctggttccggaacatatcaaaaacatttgggcgctgggtgaaaacgcgatcaatgacgttgacggcttcgatccggcaacagcagaaggtgaacaggttctgtatgtggttctgtatcatgcgcttcataccatgaatccagatctggcatggaaagttctgaaaaagctgggtgatgtgcgtctgattaaagcatacgataactgctttaccaaacaggattattccaacgctaaagatatgatctccgaagcggttgttgatccggctaaacgtctgatggatggtgttgattacaacatggttcctgatgaaaacgcgtttactctggttgatgctctcgaactgctggcagaaaccgacacagtgatcgacctgtcttctgaacactgggcgtacaatcgtacaggccgtcagactgtccagaaagatgatgatacactggataaactgtcagaacagattgcaaacgcttctactccggaagaacgtaaagcactggcggcgcaactggtagcgcatgaagtatggaaaccggaatttacccaaaccacaacgaaagttgcagtgaaacacctggttggtaacagttcccgtccgaacatttctatcaatacggatctacaaggttacgtaaccattccggaaagcaaacaaaaagagtttggattgccggaaaaagtagaaaccaaacaagtgcgtaactttaccattgttaaagatggtatcgttaacgttaaggtacttccgctggaaaccgatatcccgactctgaaaaacttacgtgcttctggtctgactatcaaaccgctggctaaaattggtgaagaccgtatgtctgtactggttgactttacctctctgcctctggttaaccgttcgatgactcgcggtatttctggtaaggaatttgttgctgataacgtccgtctggaaatcctgaaaggccgtcagaaggtaatgaagttcttccgtgataacgcgattggtttacgcaacgcagaagggcttaaacagcgctttggtgaggcggctggtgaatggttgtctgagcaagggatccgtgattacggcttttctccgaaggttgagcgcacagaatcgactgatgtttacatgtcgaaagaactgaacgtgaaaatcaaaggcgtttcatcacttccggctgttgctgctaccgttgcaaaacgcgccgaaggtaagaagaaactcaacaatggcgacctgatcattctgtgggcttatgatactgtatctaaagagatcgaagcgcttgacaagaatgacctgatcgagtatcttgataagcagacaaaggaaactattaaagaggttcgcgcccttaataatcgcctgagtcgtgtaatgtacggtattgtcgtcggacacgcatggtttgcggatctggattttgaagaaaccagcgtaagcgttaccgcaacagatatcgttgcagcggaattctggaaagatgtgaaatttgattgcacaatcgttctggaagaaaaagaagttaaactctaatgagatctcgcccccgaaagggggctttgaggtgacttgtggaattacttgaattggactttaaaaatcttatgaatatatgcgaactgaatcaaggtgacatcctttatttctccaatcgtgatgggtttcgtaattcccgtcctgaaaacatcggctttcattcacagctacctgatttcatcgtcgttgatgatgtccggttaacagataacggctggcaggttgatgtagtcggattcaaaaataacaacggtgctatcgtatggcgtcctggttctattgatgaatcggtgtattttaacaacattcgtgtaaacatcgatgaaatcggaaccgatttgagcgaagtgcgggaatctccgtatgtgttcagcaactggtttaaagttggtggcgcgtatcgttctgataacacaaccgttgtttatgttgatagtttgatgtctggtatggttaacttcaacccgtcattacctggcaacaacggcacgatgatggacattttcagagattataatcgttctggaacaatgttaccttctgaaaaagcatatgttatcaatcgttgtttgaaagggctgtaccaggatatgcttacctataacgaaggtaacgtaaaagatgcgcttcacgatctgaataagatcctgaaagaagtttctatgagaatggatacccgcaaatgatttctttattcgcgttcgtttcagttgttgtattgattttcgctggaggtgttatctatcatgggtgtgaccgtcgtgaagataaggtcattctatggggtatcgtctttgcgctaatccctctattcatgattggtaatatggtgatgcgatgaaaattcgttctgggtttgtgagcaatagctcaagcagtagctttattatcgggatcggacttgttcgccctggtaaagaaaaggaagttgctgatatctacggtgagaataatattgagtcattaatagatatgatcaccgatgatactcgttcgaagtggggtattcctcaagtcgatagcaacggtacgatctcactggaagcgttcggttcccatagcgttgagatttcgtatatctgggataagttgaaagaactggggatggacgatatcaaaattgttcacttcaatgaacgcggcgatgaaccagaatatgatgatgaatgcggaagatacaattatagctggtatgaagacgccgacgcgttcgggcctgaactcgaaagaaagtataatttattacgtgataaccgcgaactgttcattgaaggcaatgtgaattgtggcggggattacgacggttaaccactggggtaatgcatgataacgatagtatactgggaagaagtcgaaagcgaaatgatcgatggggaactggcggaggttgacggggaatccgaaatgcttactgctactgaaacaatcgaaaacgctttcgatcgaatcaaagcgcatcaaaaagaaatggaaggtcgtgatattcagtacatgatgagtttctgggtcggaggcgaggcgttatgtcatgccgtaattgcggaaagcacctcagttgatacatgtcgtgaaaagatcgaacagtacgtgaaatctttcttgcattgatgaaaaagcccttgacttcggtcggggctttttgctatattggttctatcgaaaacaatgaggaatacattatgaaatatctactacttgcacttagtcttatgaccacaaccgcaattgcttcggaacctccaaccgattaccaatcatttaaagcgttatcaaaagaagaacaatgtacgtatcttccatcataccaaacgatgtatgattggattacgttatcttctgattacgatcaggtaaagtcaaaaatcgttagtgactacttgtataacatatcgaaaggttgtattcttaaacttcaactgcaagtggatacgatgaaacttgaaaaaatggaaagaggacaataggatgaactgcgtatatatcatcattgaaaaatttacttctcctgctggtaacgttgaacaaacaacagtctgtgctgctctgaatgaagaagaagcaaagcataaagtaaaatatctcaatgaaaatgcaattattcctttcggtttcaaaggttatactgtaaaatacgaatatactgcgatttctcttgaaactagcccttcatggctacttgatatgaaatgaggttaaaatgaatccttatacaaaatgcggggtcatgtccctgttattaaaagaagttgtgcggttctatagccctattggtaaagtgtggtgtgtatctatcgggggtagacaaattggatggatccgccgtggagacacaatcaaaggctggcaccaatacactgcaatttctattatgggctgtgaatatggtgagtttgataacttcatgcaagcattgtcactgttcatagataacgctattcacgagatcagttcacagggttccaaagttacaaagtacatggatactctttatgtgaacgtggaaaccgatcgatattgcatcatcaaagaagcactatacgatgataatgatgaggtgtattattacatcgtatccgatcaaaaccagatgcaaagttatatctccccgtttgaattgcgatatcaaacactaatgggattcattgaattctaacaaaaagccccaaccgaaaggaaggggctttttgttatgatgcggaaagctgtagtttgatttgctctacgtcatccgggtcatcaatgatgctgtaatagatggttactgttactgagttatcatcatactgtggaataacttcaacagaaagattatatactctaggctcatatgtccggatcgcagatacgatagaagttctaattgattccgctgtcagagggttcatgttctcaaacagcatatcactaatagcacaaccaaagttactatcaaatggacgtgtacccttgatcgtggttacgataccaatcaaactatttcttactgctgcggccccttttgaagccgctacgtcattattccaatctcgttgcatgttaggttctatatcgctatatagcaacctcagatttacacccatttagaccacctttaaaaattgctgtaagcctctcagagagacgatatggctatgtccacacgaacaccttaccggaatgtttgcgaccactgctggcttatccagggcggtagaaatcgatttataggttgcatagtcgattgcatccaacaccatttctttatctttgtcgctgcaatcactccacatgatctgttcgccgtctatcattacgtaatcgataagatcggggatctcttcatcaccagtcttacgagggtgaacagatagcgcgatcccgtcattgccgtatagcttatcgtcgaaatcttcaaccatgatttgattgcgtttaagctggaattctattctttcctgacattcttcacagttgatgaacagttgacgggtatcaatatttttactttccagaagtgccagaatgaaaagatattctttttgatacaggtaaacatcccctttgataaaatctgcattgggggtaaactctgtatgtgtcagaggacgataatcaacattatatttctcaacgtgtttatattcatgctttctcatttaacagcaccttgttttttcaagtcttctgcaagcaatgcagtataaatttgcctttccattgggctactattcatgataggttccaggttcaggccgtttttatttagcagatagttggtcttcacaaattcatccagatccccgcgactaaacaggatcttgaacagggttaacataccactaaatgatttaccgcgcatagacacatcaaccgatttcgttagcatagtaactattttttcgacatcatcaagttcgactatatcaagaatattctctttcgtttcttcggttagtgatgtccattcatagcgctgttcgttgtatattacataactgatacattcaagaaacaactcttcgcttgtattgcgtgtacgggggaagttaaaccctaatgtgatttcatcattcagcttgtattcgttttccagttgaatatcattaatcaccatgaaggcttcggagtggcccccacctttaccgcctatcacaaccttgataacgtttttaccgaacgaaccacaatacacccggctgaaaatgtattcctgttctgttttggaatacccaggataaagcagatccagcacttcatccagtatttcctgttgctctttaaggggccgaccttccatatcaatacgggtcagcattaatttaaactgatctttaactgtaaacatagggaatcgtttgatccctgatggtaatgttactcgaataatatcaaacataagatcctcaaaaggggccgtagcccctttattgtcctgtaattgcggtacgtgctgcaatggctaaaccttcctctacggattgtttgaacccttcccagccttctttatcagcctcaacaacccatgatgttttataggcaaaatcaacagtaaatgtccagatttcgttgttgttctcatagctcaattcactgttactgattttgacgggcaagcacttctgaaatacgtatgttgtatgcggtgaaccatcacgatcgtgtaagttaacctgaatagtacttgtcacttcatcaatgaaggcgtattgtcctgttacatcatcgcgaatagcggaaatccattcattaaagattttcaggttacgggcttctgaatcggtgcggaacgtcaatgacaattccccattctcagggcgagtgaatctgatttgaggtacgccaccattataaacgtattcgtacccaatggatttaccagggaggttaactcccataatgcttaaacccatattatacatcatttcatcacggaattcagatagcagttgtccatacatgctatcaccaaacagggaagtaatcaaacgggggctaattgccccgatgattttgctaaatcctgttttgttcagcgacataatcgccttatcgacggtgtaactaaacaatttactcacaccgccagtgatagcattaatgaattcgttcgggttgtttgcgttgatagaactaatagatccatcaatcaaagtatctcgaatactaccgatcgtgttgtcaaggatacgtgatgcagggctggttgcaaatacaacgctaaacaggttgctacgctgaaaatcgcgattagccatacctgataaaaattcatctacgttgtaaaacatcatatctccttagtaatttgtatcaaaaatagaatcctgacgcatatcgatcagttccataaattgaatttcgacctcaagtgagatcggggtatttggtgattctcttaatgtatttacaatattatcaatagaacgaccaaagcgaacactggtaatacctgctggcccaaaggttgaatgaggtaaacgcaaggaatccccagactggaaatcacgaataaaccagacaggaggcgatttaataacctctacgtttgaaatgaaatcaaccacgtcattacccagactattatcaaaatctgacgctgttactgggttactggaagggctaattgcgttagcggttttagcacccagaacaccgtaatactgtttaaccaatgcagcaacctctttagcagtaccgccagaagttgtaccatatcccagaacagtaaacagatagtagattttaatcagttccagcaaatcattacggctttcgatcacgaatgtattgtaatacatctttgttcgcttgtcagaaccctggaaagcggctttagtaccaacatcaagggcttctcttcggtctgccataataccgcctgaaatggattctacagcgccccataccatgtttgaaacaacacggctcaaccctttggttaagaaactatcgtttgcatcttgatagcggtggctgtttacttcgttatcgttcaggcttcgcggtagcaggatctggcaaacaggttccatagtaccaatagaactattcaacacttgtttgtacttaacattacccgtcgcagatgatagtatttgttttgggttctgtgctgcctgacgtaatgaacgatagttgtctttactaccaacaccattaaaatcatatgcagtgaacagaaggccgttattatacagactcgaagcattataagcgttatcgatacctgctgcacgttgggccggaaattcggcggtaacgatagtttgctttaatactgattctgtgattgcggcacccccagaggggataccgcgatttttaatatttttgagagtgtttatactgtcatcaataatagaaaacttcattatatgttccttatgccagcgctacgagcggtttatgctctgtgcgttgtactgaatgagttacgttgttgttaacagttttgttgttaacctgaatgttgcttgctttatcagcatccggtttatttgctgctaacggtggctgtgcgtcgatcggggtgctggattctgtacgggctgcaatcttgttttgcaattgctcgataaggtcagagattctatccttctgtacatcgtccagattaccttcattacgacgtttttcaagctgatccaacagttcatcgttaatgtatttgatatcggctgcatccagattttcagagttagcatagttggttgctttacccaacagatcatcaccctttttctcttcaccttctggcggctgttttccttccttcctcgcttgttctaacctttttgcttcttctatacgtgcgcggttgcgtttgttttcctcatcggctaatttttgtgcttcctcttcgctgcttttagctaaatcgtattgtttctgcatttcttccgttgctttcttcatattatcaagccgttctttatcagcatctacggttttctgatttctttcttgataatcagtaggagcaactttatagatagaaccattaggaatttgagaaggagttattgttaatgcatgacgtgctgcaatagctttatcttctttttctaatgccgctttttggtcttctagttcctgtttcttgatcataagaatatcttctttagtcaattcaagaccaaatttctgtttatcacgtaaagcggtgatctgcattccgcgtccggcattggtaatgctgtctataccagttgattcacccaatgattgaataagacgaccgataccctcagtgattgccgtttgtacagtttgtcccaataacttcataggctcaacgaacaagtcacgaagtgattcgcctaagttgttcatattaaagttgttcaaaccttcttcgatctttgttacgatagcctttacgttacccagatatgtaccaaatagtttttttgaggattccccttctttcaggatatcttcgaaccatttgcgtattgtgacgcgcaacacatcgaatgtaaagattaacgaaccaataaggagcgtccatttagcaaactttgccattgcttccagagagtaaccaatgaaacggctaaggatctgcgatgtaaagcctttaatagaaaccagacttttagcaatgctatccagagttttgcttcttttgtcttcatcatcaatgatgcgttttttcttagtgtctacatacggatcaggttcttccactggttcaggaagaggcttatgcttatcagtattttcatataaatcaacaagtttgttaatagcatgaaaaatagattcggtgttttcttccagcttaccgaactgaccattttggttaacgtttactgtattgtcaacagtttttgaattatcatcggttaaggatataggacggatcgggccgacgaaatcaggtagttgttcggctaatgattcctttttatcctcttcgtattgttctttgaaccccgcgaatttgtcacggaatttttcttcgaacgatttcaacccctctttgatatcaagagtattgattgcactttcaagggtgttatcgttgatttcctttaggtcacgggcgctttcagcatcaagggaggctgttactttggtgaccgctggttgtttgttgttgtttctgttcagaaactttttcttttgttcttcattgaaataagagttagccattatcattcaccaatgatgttaagccctttgatggttttcccctcatgaataatgtatacttcctggaggacaccacgcgatacctgatcatattcgaatcggtacaggcaattaattaattcgtctcgtttatcctcagttaattctactggcttaccgtcaacatatgcctctttgatgaggaacggaaggtgagcatttaacaggctgggtttgtcaaagactaaccgcacattgtcaaacgtaaaatcatagcaaggttcggagattttgaggtcatcaagatttagcccaatttctttaagcgtattggcataatcagcgttattgtgtgcatacatatggatcaacacaaattcaatttccgctgctgttagttcacgcggtttgatgtcatcaatgatgaatcgcatgatcgcaactgggtcatctttcagagtcttaatctttacaaaatgacgatacgacatcttagggatctcaatggctgttccatccggaagatgaacggttttaacgttagtcttcttgatttcaagccgtgtagtcataaatttatcaagagttttatttttcattattgcctcaaattgaacctgggtcattatttactatttagtaaataggatatattaggagggatttttatggctgaaaaaatcgtcaatcgagtcacatcgattaaattatatacatcatacgaaaaatacattgataacgcatatactgaattgctacccgctcttgtctcgtttagtgaaaagacgatgattaacggctcatcggaaacgctgatgcagatatacgacgcacagttaatctatcagcaacttatccagccgatcatacaggtatctttccagtataacggtacacaggaacaacattattacggattgctttactctaacgtagatactgacgataaaaaccgctctgtgctgcgtatgaacctctctccgctgcataaaacgttcagacgtaagtttgcccgttcatttagtaacaacgccgtacagacgattacagagtgtatgacggcactgtatagcaaaatgaaactacttacccccgaagttgacggcggtaacatacgtatccctcctggatgtctaaatggtacatatcaggatatattcgattatatcagggacaacgggcaaagtgtagtttcttctgatttctgttatctgtgggaagatggttccggtattttccttaaaagttcaactgacattctggcccagacaccgatcccagcatacaaatttaacgttgataacgtgtttgttggcgatactgtcatattcacagaagcccagtacattacccataaggataacacaacgctgtttaaagacgccagtttctttagtctgtcattgactgataaaaagatgtacggtgatatactggctgatacagacacagagaatacatggatcttcacaaaccgtaatgcaatctatgataccaactttcagaacccagattcagaaggtaaacctttccaggcgtctaaaatgcaattgttatccagctatgaacgccggatccgattcgatataaagcagggtcgtttagatgttaaggtaggggcaatcattgaggtatttggggaagagtatgcaggaaaatatctgatcgttgaatgtgttcgagacgtatcaaaagatttccacctgcaaacacttgaatgtatacaggtgggggaacctaccagcgccgctactacgaacacaactagcagtacttaatcctcaaacaatccgaggtggagatcgaaaacattgttattgacctttttacgggcctttatgatgttttcgtaatgttcgcgtggcaactcaaccaaaaaacactgtctgtcttctggagcattctcaacttgtgcttccagaagcggatagttcttaggatcatcataatcaatgttgttatcgagatccagaataacacaacgccaaatttccggctctgctgatgttttaacagtttgaaccaatgacgcgtttttcaatcccaaacgatgcgaaagaatttcatgggcgaattcggggtcatcataacggatctcttcaccattccaacgaataaggcgaacggttgcactcaatttaaatttgctcatatttcattttccttgtcatcaattcacgtaatttcttagttggcgctggagggtttttaatgatttcctggatctgatcccatgtttcgggggatacttgttccttttccatcacaactatatttggattatcgcagcatttaccaacaagaacagaacgcccacaattaaggcaaatcgtatcagggcattttccaagtttatcagggtcgatagattcaaggaatcttcttgctaccgataaccgctctttaacttcttcttcgctaacttccatttgtaattttccgctattcataataatacccttatgcgatttcgtaacacttcatgacttcttcgaataccaacggcatttccagatcccatgaatcagcaactgggtcatatgttgcttgatctacaagggaaaccggaattgcagaaacccaaccagaaccaccctgaacatcaacgcgcttgaccgtcatcaacgataaattgttatagaattcttcactgaatttttcgccaccgttaccaagactctctaacatttcacggttaacgagtttgatgtttttaccttccaaatctttgttgatatcgatgaagttcatgtgatgttccttttgtctgtttcgtttcgatgaacacactataccaaacaagaacaagatagttttagcaaaaagtgctattaatggagaatttcagcagtcatcacgatccacatagaaagaggaaacccgtgaatgaatacccacaacccaaaatcatcacgtttattgtaaatcaaagcagttatgaatatcgaagccgcccaaagagcagtaaacagaagataatcactgagtgtgatcatttcttcacctcaaacaaaataccgtcttttgttgccagatcgatttcggtttccaacactgccgcaagtgtccactcatcggaaccaggtaagcgcctttccacttgtccgttatccagcttccgccactgtgcgccattaacgcgagattcataagaaacgttaactttcataatcagcccatccatttacggtatttgattgattggttcattgcagagataatgccagattcttgcatgttagaagcgcaatagacttcggcaacctggatttcgcggtcatagaggtaaacactaccacgaaaagttttcaagtgagcgaatccgcaatctttaaccaggttaaggaattctgctttcttcatcatgtgagccattttgtttatctccgtgtttcgtttcaatgaacacactatacaaaaaagccccctgcattgcaagaggcttctttaacaaaaagtgctattaaacggcttctgttttcacttctaaaccaagtttagcaagcgcttcaactgccatgaaatgattttcaaacggaacttcaacagaaattcgaattgttggcggtgttggatcagtcagatattttgtcatttgacgatctttctggtttttgcaaaggatatccgccagcgcttctaccgcgtcagaattgaaatcgtatgcataatcaagtcgggattgcacataacgcatgttgcgttgaacataatccggatattcttcaacgatcggggttgcaacagccgcttcgctcatgcattcaaagttaggttttcggaaaataccaacacacttatcatcggattcgttatatacgaaaataaatgcgttgttgttcatgatatgaacgcactgatacaccggatgtcggtaaatcactttcagtactttcttcacagaaggtttgataatgtgatttgtttcgaatcgggaaccttcggtcactgtcagcagagattttacttcgtcgatatgtttaccggacaggtttgccataagggttttgtgtttctgataactactagtcataatatattctcttagtgatttacgtttcgatatgcaatataacaaagcccccgaccggagtcaagggctttttattaaaatagatctgcaaagacaatatgaatatcgtcgggttcggtcttatcgcgtcttatcttcttgataataggaaggaagaaactgtattccggttcccctttcttacgcgttttcgacttctggaggccgtcaacttccatttctacaatggccccaatgtattcatctttatgcgccatgatgtattcgcgatccagttcaccacgttcatctaatggaatgtatacacgggtaataccatcatcatcgtaacgataatcggtatcagttaacccagatccggtattcgttcgagccattccggataaatcttccaccacaaacccgccgaccttatggtcttctttagtgtgcgcgtagatatcaatgatccgtagttcaatcggggttttgtttttcagcttaacctgatcggctactcgcgaatctttccatttgaagtttctgtttttgagaatagaaccttctttaccgtcattgcggtaattgttatagtcctgtttcgcttctgcgatgttattaaccagcttagactgaatcaaacgaacagaaggcagagaaagatccaggaggatatcacgcaacaggctaaaccgctcatcataagtctgaacactttcagcttcgccgtaatacacctcatatggaataatatcccaaacaacataaacaatgtttcgctgttcttcttcggtgatcgtccctttcagagatttgtttacgatcccgttcccttcttcgcgttttgcttcggcctgttcttcttctggggtcgatactttgcgaacttcttccgcaaataacgcaatgtcgttatcatcatcgtccatgaaagcagataaagaaaaaggcatgtctgtttcaggttcaggtaatgttggtacggttccggaaggaacataaatcaattctccatccagaactacatcatatcccagataatcgcgaatctttttcagatcgatatcaagctgagttaacccttcgtactcgttacccgctctcgataccttacggtttaatgcttccagcaaatcagccatacaacgcgcaccatcggctttaagctgcgagtaagcagggaaaatgatgcgacgtaaagccttttcactaaacggcgtagcgaggcattgaggctgttcaggtataagtttcttccatacccggtttggtaaggttgtgccagcaccacattccagatcgcggttaatgatacggcgtagcacttcacgatcgttaatgttcactgatgatacaatatccagtaaacgatcacgagctgcattgcctgtatatttccggcttgctaaatcttccagtaatgctttgattgcatcggaaagcggtgttgtgcctggtttcccttctaccagaggaaattgacgcacataaaacataatctgttttgtatacgtaatgcggaaaacttctttcaacaattcattatctgcattacgttttaaaattgcttctttctctttagttttcagagtagaagcaagttcattaaggattgacaagatcatttagtttctcttcaatttcaaaccacgattttactaactggtgaggtgcatttgtttcttcacgttcaccacgtaacatatggaataacggcaactgactaatgacgttatgacattcgtttaagtttatcgcgagatcatcgacaaagcaaaccagacgattaccatactttgctttcgcttccaggtaacgatgagtttttgtttcaccgtggcccacgaccatcacctctttaaacgcagaaggaaaaagagtattcaggttagcaattcggttaaggcttgccgttggtgttgttcccagagcggtaacggcaacgaaatcatactgcgttttcagacggttgatcacaatcaatgcatcatcatacgcattcagataacgaatgaaagaactgttattgtattcttccataaggattttagccaactgctgatcacatccgaagatttctgtcatatcacgaaatttttcatctgtaaccatttctaatgcaatatcagtaggcatgttgtgcttagacaaaaagaacggcaaccccgactgccattttacggcgatcccgtcaatatcagtcagaattacaggctttgcgtttgtgctcattataaaagtttccaaatagttctttttctttgttaattcgggcagtaaccgcgtcatcataagacgcaaaccgacctatatagatattctttccatcctttttaatagtggaaagccatttgtttctttgtgtatcccatgatacaccagggcaaccagatttattcaacgaattgatattttgtttcatcatattctgttggtgagttgctgcctgaatattacctacaccgtcaccattgtcaacctcttttatgtggtcaacaacgtcaggaagaaacctattccgtgcataaaagatgactcgatgacggtagtaatattttcctttgaaccggattctacaataaccatcgggacggacggaacccgcttcttctccaacaacagtctttttggttatcttcttagcccagaaacacttaccagtttcgaaatctattcgtaaactgtcaacgagttcatcaagttctgtcaagatataacctcataacgatcaaagaaaagggtacttttgaatgcattcaattcacccaggaattgttcacgctcaaatgtccgataatattcaaattcgatgcacaacatatcatcatttgttacaccaatgccaacgacatcttgatgatatttctttgcctgttgaagcacgaacggatcgagatccgaacaatcgaaataaactacgtaactcatatcaacccttatacatataaacagcatctacccctgcatcaaaatcgactttatcaaagacaacgccgtttgatgcacattccttaacataggattcaataacaaccatgttatttgcgccgatggtaacataatacacacctgctttatagataacactctgaatcaacgttgaacgtaatgcatgttgtgcatacagtaacgctaatggattaatcgcgcctttgaacaggaacacgcattctactctttctttttcactcataacagatctcatttaaccaatggattataaaaatcaccaaaagtttctttcgctttttgatgatatgctttacttgcttcttctggagtatcgaaatatcctaaatgtatttgttttccatcaatacctatagttgctcgatacttttcagcacgagacgaccaacacacccctcgataaccacttttgttgtttttctgtcctttctttttaataacgttttgtctttgcgatgcctcttgtaaattatcaataccgtcgccatgttcaacaccatgaatgtggtctactacttgaggtaagtaacctttagcaaaatagaacacaatcctgtgtcgtctatacaacctataatcgaaacaaataacatgatatttttctttcttacatccagcaacatcaccaacatttatagattttctgggtcttttccaagtacatattccagtctctatatcaacatcgatataatgcaataatttcttgattccttcaatttctttttttaggttatcagcgcttttcataacaaatttctcaacctgttcaaatttctaataaattctcgttctgtcagaatagtttcgttcatacgagatttccccattgaatgtgtcaaggtactttttccggttgctgccagcgcacggcggaacccgtcattcaggaaaagagcattgtacgcattttcaataagaatctggtacgcttcggattcgcgatggatcggtgtacctttccagtacaaggtctgatcgcgataccatttctttttcttgcctttgaacttggcggctttaccaaccagcgtacatacatgcgcttgcatgtctggattgctgaatttcaggctttgtaaaagcccctccatcgatgcgcattctaccccgtcgaacgtaaacggatgcggggcaaagttgcttaaagcgcatgagggatactgactacctgatccgatgtccattttagaataacctcatgatatatgcagttaatgggattccgccaaacaaaagaagcattcccaggacagcaccgattatcattgcaatgggttgatcaaagttcattttctgcttccttcttcccttcctggcgagcgcgtttgcgtcccgcgcgtactaaagaatcatagtacggacgtttgcgatcgatgttttctgtacgatacgctttaccaaaatgactcgttttgaatccgtagtatttcacacttccacctcatgggggttattgtgcaaaccacgggcctgatcataacgatcataagttgtttcgtactctgatttaatggatacatcacagcgagtgttccattgttccagagcgctgttaatttctttcactgagtcggtgaaaaattttacaatactcgccatacactaccaccttcataaaatgcatttagtttatgtaacatttctacacgggctgattcttttgcggggctgcaagataatgtcagaaccaacccaacaggacaatcaaaagcagtatcaatcgttactctttccagacgttgcccgtgatcacgaatcatcttcaaaaaggtatcagataactcagtattttcgtattccactttatatatgaatcgtgccatagttaaccccttgcacatgaaagataagaacgcttcttgaacactttaacttcgtggcccctaccgcttgcagcagtgttaagagtttcggcgtgacgcgcaccaagtaccagagttttaaccggagtaaccggagcagcgataacgataacagcggcccaacgagcaccaacagctttatcagtacccatatcgatagcagcagaagtatttttaccagccgccagaacgtaagcacgtgcttcacgacgagttttgaagaaaaccagttcattcatgttgtaagagcgtttcataatgtcatcctcataaaagtgttttcttgtctacgggattaactataagggaatgtgagaagggagtcaacaactttttacaccaaaaaagaaaaagccgctacctttcggcaacggcttgatttttaatatttttcgtcaggctgaaacaccgcacgacacgcccacatagaggcttctttcagtcggtctttcgctagttgaatttgatggatacgttcaagcacctcatctaattcttcctctatcagtgaatcaatatctgaatttgatagtcgctgttcgatatcttccaggattgcacctaatgcattttcagcatctttgatacggtttaccgtttctacttttttatcagtatggggtttataacccttgatatcatcaattgccattatagactctctgtaaaggttcgggcgataacgtcgcgttgctgttcaggggtcagtgagttaaaacgcactgcataaccagatacacggatcgtcaattgtggatatttttcaggatgttcaaccgcatccaggagagtttcgcggcgcaacacgtttacgtttaaatgttgtccaccttccaccttaacagttggctgatattcgatctcaatctctcgctttgcaaacggagtaacgcgagctttaccgatcacagaatccatagttaatgtttttgatactacgatccgaacgtcgttaccttcttccaggtagatcgtaccagtatgcaaaccttctaaaatttgaaatgctttcattgtattacctttacttgattacataatacctgaacgggttgaaatgaaacgccagcattgcacgatccaggttaactgggtcgctaacttcttgtttcagcttccatccagcataaacgcgcaaacagaattgcactttgtggatccgtagccacggtttgtaaacgtacaaaccccatgctgattcgttccacatgagcagatacccatgatttacagggttcggcccaccttctgtttttgggttgcctttccagttgaatttgcttgtcgcttcacgtcctaaaacgtgatatgcgaagttataagccttgtttctccacaaccagccaacacgctgcatgtataccccaaaatcccccagatgatagcgtatagacgcccaacggcggatatgtccaccatcaccatcaataggattatcgaaggtttccatccaccggaagcctttaggaagatgccctgttttctcgttgtagaacggtacaacaaacggagcaaacagaattgctaatactccagtaataatgtcaagagggacgagtacgatccaacttgcatactttaaaaagcgcatagacaccccaaaaataaggctatccgaagatagccatttgattatttgtttgtgttgatgtatacaaatgattcatcaaattcactgctaaccgcttcatttgtaaacggaatttcaggatttttgaaaccaccactaataagatactggatgaagaataccgaagtatcaagagaaatcaattggtgattgctcggagatatatttgttctacgaacgaggttgacaatctcccaatcaaagaatcgttcgctatactctttcttactattcacttgcggcgatgcaaagaacccttgtttggaatatgcctcaagcgctttacgaagttcagaatcaaaatcatcgaactcttttacaaaaagttccatcaactttttattgcgattcgttggattgctttctccgatgatttttctaattgccggagacatttcaaacagtttttgtaaatttttcatgttatctctttaaatttcgtatgcagagtcaatacaagattcgtaaagctgttctggcgaattctcaatgagaggcgttgttttaccaaaaatatccagatcgtaaggatcatcatccacataacattcattgaatttgaagttttttcggtagtccccatcgggcaatccatctttccattcattaaatgtcatgccataacgttctttgaattttgcgggagacatatcaacaaaaatctgtgtatattcgaccgcgttatggtatttcacagtttcacgaaatttcatataaacctcattaaaattagtgggctgggagtttctttacttcaccccgcattccggggaacctattaccggataccaacagagccttctccgtgagaaaggttgcatattccgaaccatttaacggcattgcgctacgcaccctaatttggtggcaagggtaggatttgcacctacaaccaacagaatcagattctgttcctcccgcttctctaagtgccttgccttgtttggtggcccctcccgtgacttgaaccgggaacctaaccattatgagtgattagctctacctattgagctaaggggccgatatttttagaactgtttgcggtagatttcgcgaacagccggatcaacagctttggcgtatttgcatacatcctcgaactgtacgatgtattccattacttccgaagcacgggaatttagttttccctggtgagcatcaatgatcattgaagtcattacatcgatgcgggtcggtgcttcgaggatgtcgcctttgtcgaaaagttttttagattttgcgacggtatcggcgatgattgcttgaatttgtttagccatgttggatctcttattcgtaaattgcttgaatcgctttatagtgtgcggttacatatttaaccggatacttgcgagcttcttcttttgttgcctttcctgcaatcagttcaggatccggcacgtttgccatttgtgcatgaggaagcggtacgcgcttacccataagcagggttttatattcttccggtacatccggcccacatgataacactgtgccgtagatcggttcctcgccgtgttgacgaacaccagtcacaataccagaaggtgatacaatttcagttccagccgctttagcgttggtttcaatcaaaacatattcaaaggatgcttttacactcagttcagacatacatttactcatttgttatttgatccggaaatgtttattcatttcttcggggtcaagttgtactacttcggcaccgtattgctgtagacgccatatccactcgatgccaccacgatcgtatttatgtagatatactacacgcttaatcatacctgttgcaacacaaaattcgatatttttcgcacattgtgagcaaggggaatgagttgtatacaaagttgcgtctttgatttgttcatgagacgccgccagcataataacgcgcatttctgcgtgtacttcgttgcgatctgaccattgtgaatgttcagggcgcttttcttcactcagtttcccgttatcatctaataagtgattgcactgatctgtacaacgatgactaggatcaaccgtattatttgcgcctacaaacacacgcccgttaccatttctcaatgcagcaccgacattaacagagacacattgagagaacttagaagcgcttattgctctaagcataaacataatatcatcaatcttcatgatacaccacgtgataaagaactttccagtaaagttgaatctttccatcatctaacactcgatgatgagcagaaacagaactgattactactttttctggactcggtcgaaaacaacttgtaaattttcgaacaagacaagcaatgaaagtatttgggttgtcgatttcgtcaatgatagtattaacagttacttcaccgaaatgacaagggatatcatatgcttttaatgcttccaggagcaccatactcatagagccaggatgatcaagcatctttcatcacctttagtagctgtttgataaaatcaggagtcgcttcaacgatatattctgaaccgttgattgtagtaacgcgaacttctgtctgatttttgttgatatcatattctgcaatcggacttgttactacatcaatatcagttcctttgatgtatccgaaaacaccgccataataacgaggatccgggtatacagattagtccgtaattaccgctctatcaataatttttacgttcataatacagccgcccatgtaacgtagccagtaataggatttaacaccagcccgaaagattgggtgctgttagtatccacgtcatgaatatacacaatataggagtactgagaaaccggagtggcgctaacttcaaacccgcccggagctttaccctgttcctgaattttgttagcaattttttggcacaacaaacgaactttttggttaaaatcgcccagattttctacgcgaatgcgatcgccaagttcaaccatgatgtgtttatcttcacgaataacgttcataatataatcctcttttgtgtgggtactttaacatacccacattatatgtcaatcagaaatcaccataatcgacttgtaagcacggaatcccgtttgctcgccacattccgaccggagtgtctctatcgtccactgcaataacaggataatacttatctaaaatcttgtcaaacaaaatttcttcttttacttcaaaatctgtcctggtatcaccttcttgacgcataaaaatttcatccggttcaacgccataactcaacaggctaacccatgtatcatgtgcgcattgcggattaccttcacgcccagacacaacaacacacttataccctgcatttttgtacaggtgaaacagttgctggatcgggatatttggcggatcattgatcactttggtaaagtcatacgggctacgttgtcccactttggttagagtaccatcgacatcaaagatcacacacttctgattgtggggattaacaatttccattgctggtacgaacccacggatcttacgatactggttaaacatttcccaaagacgcgaaacgggtaatgcatcacgaccgcgtttgtggttacggcgaagcagttcaacaatagacacatcaaaatattcaatatgaaaatcagctttgtgttccaacgcaatttcacgccagtgatttttatcactttctttcagatgtgtgttgtgtatgatcacgtttttaccatctttcagagtggagataacaacgtgatcctgcatttctgcaatcatgtcttctttcgctttggtgtatttgtatccgccagcacctttacccgcattatacaaagagctacgcagatcatcgcgagagatcgtaacagtattacccaattcacgggctttctcatgcgcccaggtagtttttccactacccggaacgccaatagtcataaacagattcatttcactatctcatattcaattagttctttgttatactcattcgtcagattgagccatatatcacgattccaatcgttttctatccatagaccttctttatcctttttcgcagtataaacttttccttctgttatgtcacgaaaaaatgttttggttattttgatttgcatttctcagggtatcccaaagtacacagaacattatcggtctgatccttttgtcttttaacgtcgttcatccagctacgaaaaatcaatgaatctggatatgataatgcaacataaggatttccgtcatagggcattacaaggtattttttaccgtcaatctctcggacttctgcaaccactttccatttcacattcaccggattcaccttagcggggagcgtaggcaaaatcttttctgggggcttctcagcacacccgaccaacagaacgcccagaacaagggctaacgttgcaattttcatttgtcgtattccgccatatactcttcgaaggatttgttgatcttgatttcgatcagtcctggttttttaaacagcagatctttacgtccggcatccttgaccaactgttgatccttacctttttgttcgacatagatcacagtattactgttgtttgtctcttttactttcttgatatcagcttgtaacgctttgatatccttagacaattgcctgttttctattttggtatcaactgcaatgtaaaaaagggctattagggagcaagcaacaataataggccatatccatgattttatattaatcatacccaagatgcttttgatattcattcaaagtttcctcatatgcgatagacgcctgttcttctgtatcataatatcctatatgtttcgttttaccattaatccgtatttgtgctctatattttccacgagaagaacgatagtcaaccccttttgatgtggtagttttagattttctggttttgtttttcttcaatatattatgaacgggatcggattcttgaagattatcaatacaatcaccaaaatcaagaccatttttatgatcaactatgattggtaagtaaccatgaacatagtaaaatattattctatgcctcatgtaatttttcccagcatactttattttcgtataagggtattcttcacaaacaatagaacccgcttcttttcctctcttacttttatgatatgctttatcattccagtaaatttttccagtttcggggaaaacatcaacgaaagaaagcagggaatcaatccctgctttttcttgttctatcgttcggctatatgcgccaaatgatttcacttgtactctccaggaatgaactggtcgtaatttttaaccatcatttcaatgatgcgatcgaccagtttttgtggatcggtttcttcgaagtacttcataagaggcccgaagatgatccgaccgtcgtttgacaaatccgcgcttagactgatagcaaaatctttacgcgatttccctttattatcttcaatagctttgaatgcttttgcactcaaacgattgagactatcaaggaaaagtttttcgaaatcgtcaatctttttcagagagaccagatccgaactgaatagctgtttcaggtcatcgaccgtattctcaacaatatttaggaaaagatccttattgttggtgatgctatcttttgtgcgatgcaggttgacataccagtttgttttgatttttacaaaccctttcgttgtcagaacaacatagccttcgaatccttcattctgatatgcttcttttgcgaatgcatccagatccagtacttcgatattctcacgcttaaccagatacgcacgtaacagcgcgtcagcaaagagttcatcataagggatgtattcacccgtgatgttgtgacgaacgttcaggatacgcagatcaggagaatcataaccaacgacaatacggtttttcggggaaacgtattccatgttcaccgtatagttttctttagcgatctcagttaagcgggtcagcaattcacgatttgccattaacacgctgtgcgcatccatagcttgttctgatttaaccgaacctttagacttgaccgccagaaatccaccgtcaaggaaagttgagatcaaggaaccatcttctttaatcatcacgtctaaaacttcgcctaattcaataggagactcgttaagcgcttcccatgcctttacctcggcatagttaaaaaacttctccatagggcggctgatgattgatacgggggtatctccatccatttcaaacatgataccgcgacattccagagcaccaggctttagccagtctgtatatgaggccatgcgatagttaaagattcgaacaggtgtacccatcacggttacttgatcaacgaagaaaaatgtttcggattcaccacacaactgcatgagttgtttgtaaagggtattgataattttagtttgtgcctttgtcatagtgctgtttattccattcagggttgtattttcgtatcatgttgatttcataatcatgatatgtattttcatcgtgagtagtcacgataagtttcacagtttttcgttttttgatagccatttccaatcgacacgtttttaagatgttgctggggttggcttctctccaatactttgcattgcgatatgtgtctaaacgcttccacatatccctacacttaccaacatatactatttcatcgttaattgcaataaaataaacacaatgcctaagttcaccacacttaacaaaacttcgatcgatgcgaccacatttatcaagggttaagttgaattcagatttcatacattatatatccaaaaagtcaagtgatcttttcttaccacacaaaacattaaccacatgcgcgatgtaatcaccgtgacagggaagaggcgcacaggtacaaccaagcctctttccatcaagttctttcaattcttcaatcgtgatcgccccagtacgaacctgattctggaaccaggggataaacgctaaaatgttttctcccctggttcctgtgtgataagggttgccgaacttcgtacctctttgaatatcgacatcccaatcagttttgtacttgtttactacccgacaatcacgcgtatttgctggcccattttgcatacgcttcatcactgatttcagtattcaggtttccgacgaggtaagaacttacttcaacctcttgcggggcaacctgtacgttatcacttttgagccatttattcatccacggatacgggttagggatcggggtgaatggtgaatcaagccctaccgctcgcatacgctgatctgtaaggtgttcaatataagcgatagtgcttttcagcgatacaccttctacatcaccaacagagaataaatgttcagcccattctttttcctgttcatatacttccaggaagatagcagttgcttcttttttcagcctacgggagatttcaaccatttctggatcatctttacccatttgccacaaacggattttactctgagtacctttctgatgcaatgcttcatcacgcgcaatcaggcgcataattttcgcgttgccttccatcttgccttgttcagcaaagttaaaggtgaaactaaacgacacatagaaacggatcgcttccagagcgttcacagcgtgcatacacaggtacagagcttctttgcacttagtggcctgtttagtgtattgctcgttataatacacgacagccggatcatttggtttatagccgctaacctgttcctgtagcatcatgatggttttcagcttatgacattcatcaatcagagtatcataataccgtgtcattgatgcagaacgtttcataatcgcttcattgcgaaggatttggtcgaactgtacagaaggatcaatgtgcaagttacgttgaatatgcgtgtaactacggctgtggatggtttcactaaacgcccacgtttcgatccaggtttccatgctcacatcggatgcaattggcaaaaatgcgaggttaggcccacgtccctgaatggtatctaacagggtttgatactgtaggttagaatcgaaaatgattttttcatgttcaggaagttttgcatactgcatacggtcagtagacagatcgacttcttccggacgccagaagaaagaaagctgtttttgcgtcaggctttcgaaaactttgtgtttctgcgattcataacgtgcaacaccagtatcttcaccaaaaaacataggttgttctaagtggttatgatctgggtttgtattcattactgttaacatgtctttacctttaaaaagcccccgaaggggcattaatcaaatcttacaacccgcgcaatcgtcggcggcttcatcttcatcaccagcaccatcacgcgtattatgatagtacagggttttaacaccgtagtagttagcatacagcagatcatcaatgatgtcttctgttttaactttcccgtcttcatagtttgccgggtcatagttggtgtttgcagaaatagactggtctacaaacttctgcataactgctacgtgagacagataccctttgttaccgcgtttagccatatcccagagcagatcatagaaatcaatctggttattttggttcggcacaacctggttatagtgtccttctttcgaagatttgatactcactaaaccgcgcggaggttcgatcccgttggtagagttactaacctgtgaactactttcacaaggcattaaagcagaaagagtagagttgcgcaagccgtatttcttaatctgactacgtaaccattcccaatcgcaattataaacaggtgctaccagttcatcaacggttttgcaataccaatcgataggcagtaacccgcgagcgtatttggtatcgttgtacaatccacatgcaccacgttctttcgccagttccatagaagcaacgagaaggttaaactgaaacgcttccattagctcatgaactttgtctgtatacgcttctgagtagtcgcaatagttgcttgctaaccatgatgcatagttggtgataccaacacccagagagcggcgctgtttagctttcagagcggcttttacagggtagttctggtaatccagcaggttatcaagcgcacgtactgcaatacgtgtgagtttcgggaattcgctgatatcagcgttatccagaacgatagccattagcgtacacaatccgatttcaccagccattttatcatcgtcatccagcggcgacgttgggatcgcaatctcacaacacaggttagacatacggacaggaaccgtaaaactaccctgttggttgacgtgatgagtgttgaaaatgtatttgcgtcctgtctgtgcgcgttcctgtgctaaaagttggaacaggtcaaccgctttgatgcgttttttacgaacagttggatctttttccaggctttcatacagttcttcaaatgcagtctgatcagcttcatagaacagatcatacaggcgatcgttagcaacatccggactaaacagcgtaatgtaatcacgattcattaagcgtttatacatcaactggttaagctgtacaccataatcaagatgacgaacgcggttttcttctacgcctttgttgttcttcaacaccagaaggttttcaacttccagatgccagaaaggataatacagtgttgcagcaccaccacgaacgccaccctgtgaacaggatttaacagcggtttggatatgtttccagaaaggaatcacaccagtatgaacagcttcaccaccacggattttagaacccattgcgcgaatatgtcccgcgttaaccccaataccagcacgttgtgaaatatacttcacgatcgcagaggttacagcgttaagagaaccaagagaatcacccgattcaattactacacaactggagaactggcgcgtaggagtacgtacacccgccataattggagttggtagagacagtttgcgatcggaaatcgcgttataaaaatcaatgatatgcgtaacctgtgctaacccagtttcttcctgatgcagacacattgcaataagcataaacgcatactgaggggtttcaaagatttcgccagtatcgcgatcctgaaccagatatttcccgattaactgttgggaaccagcatacgaaaattcaaaatctttatcatgatcaattgcacgttcgaaaacttgaatatcttgtttgctgtatttttccaggatctctttatcgtatttacccgcttcaaccattttaacgatgtgatcgtagaacgggataggatcgaactgaccgtaaacgtctttacgcaatgcaaacatttcaagattcgatgctacgtattgccaatctggttctttaacagaaatatgatctgctgcatacttgatagcgatacgttgaatttgtttggtagtcataccatcgcggatcagttctaatacattttcaaggaatgcacgaacatcgatattatgaccatcacaggcccacttgagcactttgtatattttttctttgtcaaacggctggcgtacaccagaggattttactactactttaatgtcattcattctcttaccttgttaagaaaggggccgaagccccatttttcatactgccatttcagcttttagagagccgtgattatgatacccttctaaggttatcgagtcaaagaattcttgatctaaatcaagtaagctatttaccttcggcatttttagaatcggtaatggcattggtgaacggttaggctgtaaaagttcttttgcctgttcaaccgcatttttatagatatggacatcaccaccagtccaaaccagatcgcccacttcgtacccgcaaatatcagcgataatatgcgtcaggagagcataggaggcgatattgaacggcaaccctaagaagacatcaactgaacgctgataccactgtagagacagtttaccgttgattacaacgaactggaagaaacagtgacacggacgcagagccatatcatcaagatcaacaggattccaggcagaaacgatgatcccgcgatcgtctggagttgatttcagttgttcgatgacttttgcaatctgatcaacaccactaccgccataataactatcatcatccccataaagagaaccaaatgaacgccattgatgaccatagattggccccagataaccagaatcgtatcctaaatcaatagcttgtttttcatagttatcatcccagattgtgcgcttatcgctattttcaccccaggtcatccggcgaagttcttcaacgttggttgaaccggacaggaaccattgcaattcatgcttgcacggtttgaagaatagttttttacaggtagttgcggggaaacctctgtttagatcccatcgggcttgtgcgccgaaaatacgaatagtacctacaccagtgcgatcagttgattcaacaccgttatcaagtacaagtttaataatatccagatattgtttcattttatacctttttatatcgttcaactacgattttttcaatgcgttcatgttcttttatgtactgagtttttaaatcagaaaattcatattttaataatgcgccacccagttcagaaagagtaaatgcaacatcacgtttaaacgctggtgcgttatacacatgatgtccgtaaatgtttgtcaaaattacttcatcaaccattttattattgattgaatctaaaagcaaccccttaccaccgatgacacatacatttttatctgggtgtgttgcttgcattgtaccaatagcagcagacaacccgccaccgtggatcacgtaatcagcaacgtcgccttttttggttttcaaaaaactacctgaaccagacagaacacaatggatcctaccaggaagtttacccggaagagaggtaaacgtatttgcacccatgatcaaaacgctatctgcggtttcttctttgaagttctgcaaatcttctttacagtggccccacggcaacccttgctgatatccaaaagcgaaatcatcgtgatagatatcaattcccaatgcaaacaccgcttttactatgctcatattgcgatccacattttgttgtcttcaacagttacaatatagcctaatgcttcaatcataactttcagtttttctttgtacttctcatcatatccgcgaatcttctcgaattcaacagagaaaatactacacccctgatattttgcattgatcacgcgagattcaatatcaaaaatcatgatatccagaggacaccaatcaacagagtgaagtttttcgcgggttagtagtgttgtgttcttagggagtttcattccgtttcctgttcattcagccatgattcgatacgagatagttcttcatctcgcggggtaaatccatatgatgcgtcgatcatcccaatctgatcccaaacatcaatttccaggatctcagtcactggaggattttgtgagatatggtcacgacatacagcaagagcggtattgatggattcggtgacagtcagagtgtcaccctgtacagatacttgaataatcattcagaactccatgcatttttcaaagtaaatctttgttgggaattaataatcgtagcgcgaataacagcaagtttcatttcttcaaatttatttcgcgtcatatacaaaccaatcaaaggaaaatagagcctttcccattcgtaagtgtcgcttacttctttaacagcattgattaaaatctcagccatttgaaaatcggtaggaggaacccaaccaagattaatataaatccgtttttgtgtaccttctttcagattttccaaacgtaaccatgttggacaactcataatattttcctcaaataaaaagggaactgcgttaacagttcccattatagttcatttgattaataagtcaagcgccacaattgaattgctgcatcaacttccttcttgatatcttccggagtgtctttgcgctgtgctttgactaacatagtcatcattttacgaatagtgttgttcatattcgctttctcacgtgctgcatgaacagcctgtgatttttccacttccggtgtatctttcttagccgcctgtggtttggtaggctgtgcgccgatttcgtctttctgtttcggtgctttttgctctgcttccttcttcacatgaggtgcggagaatttacccgccttgaagttagaattcatttgatctaaagcgctcttaacagtgttccagtcagagatcccacgtaaagatttcagagtatcagtgagtaggctaatgcttgcgcctttggtatcttctgcgatatcgattcctttcaaccactcaatgtgtttctgaccagagtacatgaaatcaaagctactgaatgagtagtatgctttacggtttacaacaatacgcttgaagttgatagtaacaccagcgccgttatcaaattcaacataaccgctggtaggcattacacgagcaccaatatctttgagtgctgcgaagtattcctctttaccaatacggttaactgtgcgcttcggcttctcttctggttttggtgcggcttcctgagcagctacacgtttaacaaaagatgctgaacgatgtcccgctgcaaactctgcgttcatcttatcgatcgcgttcacaacgccttgaacactcggtttcagtttctgcaactctttgaacgtatcaacgatcatatccaggcaagcgccgtcctcatcttcgaacatagttccgcgaagttgtgcagccggacgatacttagatacagcaggatcatacaccgcgctaaacacatacgcacctttacgcatgaatacgtgacgatagaaacgaactttcagtgtaccaacttcaacaaagatatcgtttccgctaacgtcagcgcctaacagcttacggaatgacgccaggtagtcagcacgtttgtatttgatatttttctgtacagggctgaaaatgctttccagttttttagacgggaacaggctttccggagtgatcttgtctgggtttttgccccattgataatcacggcttgccattttatgttttttagttccaaccagtacaaaggtactaacagaaacgttacccagtgcagatgaatccggagcggctaacccttgtccattcggaggggtgcagttgaaaccgaaatcaaagtaagcatcaccagaagtgaaacggaacgaagcataaacaccgtgactaccttttgttacttcctgtttgaaagtggtaggcaatccagtgtatttggtgaagtattccgcaaattcctgtgcgttaaatttggtgctgaaatagtttttcgccactacaaagtaagcatcaactttttcttcccattctttcttttgacgtgcataacgtgcgcgaacatcaccagcagtctcagaacgtgcgccactaggcccagtttttgtaactacgtcgtaagcctggttaattttctgcattaattcattgctaccaccacggtcggggtgattgcgtaaggatgcacgtttgaagagtctggacatttcagcgctggtttcgctaccagttgcgcccaaaactttcagtgcttcctgataagtcattttggattcagtgatcatttattgttcctcaaataaaaacaaagcccacgtttcgttacatgggctactttactgtatttatggatttcggtcaatagattttttcgaggaaccaaacagaacttttgttgttcttgattcgcgtcaactctatagggttatctttgaatgcttcttcaacatctttcatagtaactatatgtttttcttcaagaaaattgttgtggagataaaaccgctctatttccagagcggtttctaattcaaaagatttttctaataacataatttcatcctcttaaataggggtatctaacggcccatcaaacaagagatatgtttatgaactataacaaaatttataactctatcatagaacatgctaaacaaacgcagtatgatggatatacagaatcacaccatatcatacctaagtgcataggtggaacagattctgatgataatttggttaatcttacagcgcgtcaacattatattgcgcatctgttattagtcaagatgtacccaggaaacaacaaacttgtttttgcagcacatatgttaacagttggttccaatagatcaaaggaaagaacagctaaccgccgctatgaatggttaaagaaaaaggcgtcagaagcacataggaatagagagttcaccgaagaaaccagacagcgaatgagtaaagccaaaaagcaacaagaaagggttgtgtgtcctcattgcggaaaatcaggtataattggaaatatgactcgttggcacttcgacaactgcaaactgaaaccaggtaatgaagggttgaaacataagttcgagggtatcccgtgttcccataagaacggaaacgtacctaaagaacggggcaattgtccatattgcggaacagaatcgtcattacattatctgcgttcacatataccgtattgcagaaataacccaaatagaaagacgccagcaaaaaggaagcagttgatttgtccatattgcaataaatctggtgatgccagcaatatgaatcgctggcattttgataactgcaagtttaagacttcttaacttccattttagagaatcgaccgacttttgacataacaatatgtcggtcgaaatcttccggatccaaatcctgatgactgataacaattacgttaccatttatcccatccaatagtgcttttacagcaaaactaccatcacgatcaattgccccatcgtacacttcatccaggatcagaagggataaatcaacaccagaaattttactggttacatcgcgccaggtgaacaataaagcaaggttaatacgtgctctttcgccttgactgaacgatgcgtaactaaaatcattacgacccagcgatttaatcgattcgttaaattcgtcatccagagtgaactgataatcagcacccaacagatccagatagtacgcaatctgtttattgaagtaaggaatataacgtttaacgatgctcgctttaacgccggaatctttcagcagatccgtaacaatacctctaaaatatttttccttgacaaatccagaacgtttagaatcaagttccttttcatcttcacggagtttttcaactggggattcgtcgatcaccacgtcttcctgtgctttatccatgacagcccgaacacgtttagccgctgcaacttcattttgaagtgtaccgcgtagtgattcgtatttggatttcagcccatttagtgtacgttgttgtgttagtaaatcatccatgattttctgtagctgatcttgcttgttcttaatcagcgtaagtttctgagtaccgtttttaatgttctcggcaatttcttccatgcgttcaggagtggggctaattggctgtttacaggccggacattcaccacccttgcgatacatcacctcaagacgctgcaactgttctacgttcattgagaggcgtgtatagccatcacgcagtttttgaatatttgctgtttggtcttcaccattgatcacgcattctgcgatctgggtttgaagttcaactaattgcgctttaatctgttttgctgtttctacgtgggaatcgtagatatcctggtaacgcgccgtattctgatttgcttttgcccgttgttcgtcaatgaacttttgatgtgttgcgatctgctgttgtacgtgtccaatctgcattgaaagcgtatccagttcacggttaacaccacggatgtatgatttgtttagtttgtccatttcactgataatagacagagaaagcaaatcttcaaccaatttacggcgatctggtgttttcagttccatgaaaggtacataaccagcagtacccagaacgataacctgtttaaagcccaccaggttaatattcaacattgattcaagctgtgactgataatcaccagcggctgaatcttccggcagtttttcgccattcttccagatctcaaatactttcggcttttgtccacggatgattttatattcatcattgccgtattcgatcaacagttcaaccagacattttttcttgttgatactgttcaccagttgcccgactttcagatcgcgaaatgacttaccaaagagagcatatgtaagcgcttcgatcatggtggatttaccaccgccgtttttacccgtaatgagggttttctttgctgaatcaaaatcaatgacgatcggtacgttaccgaccgacaagatattttgataagtcaatgttttaaatttgagtttcatcaattatcctttgggatatatcactaatcatgtttgtaatcgtgctatcaaagcagtatatcacggaatcttcatccatgctattcaggacagtaaatgtccaaacctttgtttcgtgatagttgtctttaatcagagtgaaccccaatgacacatactcattataggaatcctgctgtactgcaacaatcacatcaaatccaaacattttataaagggctttatatcgcccttcttcgtttaaaatattaacgtaatcaactatttccattgctcgtaacctctgcatacaatgcactcattattgcagatacttcggtcttttcttctggagtgatctgcatgttgttgatgtactcactaatcaatccagatacacttttgatttcaaaatcagtatcgacttctgaatcagtgatcacgcgatcgacaatgttcaactcataaactgtttcttccagttttgtttgaaacttaggcaaatcgttatcaacttcgcgcacaatcaagcgaacagagcaatttttgtaatctgcaacatcaacatctttttgatccggataggtgatccggcgatggtggcatactgggttagcaatgaaagttaattcacgtttaccttcgccataagatagctcatagaagcccctggtttcgtcctcatcgttcgcgctcatggtaagaggtgtaccgatatagaaaacgttagcgccttcgttagcgtgatgatagtggcctgaatacacgatatcatatttctttaagaaatcaggttcaagcccatgttcagctttactgttcttatagaaatagtatccggacagttcaaagtgtcctaagcagtattgagattttgactttttgatgaaatcaaaaatctgctgtgtgttttcttgacaaatccacgggatcaaatcgattgattgcagcggagaagtatcaagatttactgtcatcggttcatcaacaaccgtgaagcaatcatactgatcaagaatctctcgcggtgagttagggcggatcttgtctttaaactggcaatcgtggttcccaaccagaacatagatatgtaatccggcttcttccagtagtggcacaatacgttcacgaatgaatttcatcgtggtttgtgtggtggccttgcgcacatcaaagaaatcaccagcatggaaagcctcggtaatgccgtttgctttgcagtgttctacgatttgtacgaatacattgtataggttttcttcattccaggggttgtcctgacgcaagccagcgtgagtatccccgatcattaagtactttctcataagaccctcatagcccctttcggggctacttgtttgttagtgcttctgttgtgaagctacgatatttcgaattgatgctagtgaagtgttccacatcgtatcaatgaaatcctctgtatacggctgtttgagcatatcacgaagtttcttaaccgcatacacatactgaaccttattacccctgaatagggcttcctctgcgtgtctacggaggcgtttgatctcagtccggttcttcttaatgaatttttgtgctcgcttcaatgcgtcggcttctacacgttcctggatcttttgttgaatttcctcttctggatccacttcttccacactggttagtacttctttctcttcatcaatcataagtgatctccatgatcatagtttcggcgtttatcatataagacaaaaccccttcttctacttcgaaatcggggtttcttacgtcagttggatcgatgataaccgggattcccacgttttgcaactctaattttacgaagtagggtagcaagtcaatttcgtaatcgatatcagttaatattttgtttaagtcaattattgctttcatagaaaatcttccaatgttgggaatacttccgcttccttgtctttggttttggtggcggaagcctcgtactgagatagtttgtcatgtagatcttgaatgaaaccttcgtctgcaatactaaccatatctgaatcttcacagtcgtaaacgtgctcaaggaagaatttatatttcttcgcgttctcttttttctcgtacagaatacgtgttacgaatgcttgccaacatgctttgttaatgtaaccgtaaacgttggtataacgagtttcatcgaagttatgcagtcctgagattgcagcggaaattccgtcatcgatcatatccattttccaatcttcggaataacggttgaagttgtaacgacgtgatagcccgtttgcaatatccataatagcagcccccaactcattaggcattttgcgatcacctgtttcggcgatttgctttttccatgcacagaggatagggtataatttttcattgtctgcgtagatattggttgtttctttagtcatagtattcatatttcctctttgaagttaagaatattatataataactgtagacaaaatcaaatttcattctatattatttaaggttaaagtagatctaatgatctatagatcagatctaaattatataaaatttattgattttagtacttgacctacaatgatcattgtagtaaaataattattaattaataaattatagatcataaatttgatcagatcaagtattattgatcaaaatttttatggtcttttgtattgacttcatttcgtaagttactacaataaccccgttctttgaaaaattgaggtatgtatgagcagttttgcaagcatgtttaacttgaacaagctgatgcaagatgaaggggaacccgatgatactatggtcatcgatatctctaacatttccatcgctacactgatgaacaacttcaaaccaaaggaacaagcatccatcacgatcgaaatgattcgtcatctggtgcttgacactttacggtttaacgttgtaaaatttaaaggtgagtatccagaaatcgtgattgccttcgatgacagaaattactggcgtaggcaaaaagcctggtactacaaaaaacgtcgtcagatcgaacacgaagaatcagaatgggattgggatcgtctgaacaacttccttaatcctgtgttcgaagaaatccgtcagaatatgccttatctcggattaaaggttgaattcgcggaagctgatgatataattgctgttgttacgaaaaaagctgttggtgaaggtagacgagtattagtggtttctgctgatagcgactttacacaactacagaaatataacggtgttcgtcagtggtcgcctccccagaaaaaatgggtaacgcctaagtacggttcgccacgtaacgatctgcgatacaaaaatatcaaaggcgataaaaaa

SEQ ID NO: 27 - DNA, 176307 bp, unidentified
  source 1..176307: mol_type = genomic DNA
accagatccattatctgattgtgtttcttagtctcttgctttgtcaattttgccattaacatcaccaaaattcaattttgcaaaatctccatgaagttctttagcttttgcatcgtacaacaatgcagcaccttccatagtatcagaaagacctatatacatctgttttccgtttgaacggatatcagcgcggaatttatttccatgtctttgtacgccgatataaggaatatctttccttttagaaacctttcgatttcttgaattttctggaagagtacattccctaagattgtctattccatttccagcttcaataccttttatgtgatcgacatactcaggaagtataccataatggatataataaacaattctatgaacaagatattgcttccttttatatgttacaacatgatacccatctgcgtttttatgtccagcaacattcccttttcttgctcgttgtcccacatctgcgttccataaaacatcaccagtgaagacattaacacacagaagaggtaataactcaattattccttctagttcttccttaatggtgcgttttgtcatttcaaaccctctttaacaccctctttcatagctttccaggtagaacctgcttcaccattcagggcggcaaatacaaataataagatagcaaggacaagattcacgccagcaatcaccatgattttgctatacacgaaaatgtaaggcattgccaccacccaccaactaaaagaattaccagttacgatgttgagtgctgcaagtaagaaagtgataacgaatgcgattttcataatgtcctcctttgttatgattaaggtatcatcttttttgaaagaatgcaatacctatagatacaaaaagccccgaaaggggcttaattttttatgcgttattgatgagataccgaagaacgtttttcgcttgttcctcattacaaccaactttgaaaccaggttcgatagggaggaagttccagaggaaatcaacacttccttcaacgtcatctttgcctttttccagcatcgctaacagcaaacctttgtttttgatgctgtttacgattgcgtcaaaataaccatcgctgaaatcaacattcgggttcagcatttcgttgtaagggttgttgaatacgttcattttgaatctcctttgtttaactcagtatcttgtctacgtgagttatattaccacaatggagattcaggtcaatacctttttacgattttttgaaaagtttttcgtatttggcttttacccagcgatacatatcttcggccttgtcactggcaagcagtgagaacagcagatagatcgcagcacccaccaacacaacgcctactacaatgtagacgggtaagagaactgggaagagaacccagaaccatgacatttgcgagaagccaaacactttagcggctgcaaaaatcagagttagtccagtcagcagtttgatagccggaataggaatcgttatagtcttagtcatttcattaccttacattctttatggggctattcgccccagtcaattaaaattgaatgtcagattttgcaatctgtgtcattttatcacgtcgggtagattcagcctgtttaatcatcgggccttgtgtctgttctactgttttaggcatagtgttgccgtggtagtcagatttaaacccgtattcgctgttgtcggtatccatccagcgctgattaccctttcgaacttccaacttgaacttgttgaaagtgttcttatcgccataacgggatttgatttgcttgaacagttgcataccctgatcagctaactcttccgtctcgattacagctaacataaaatcagccgtagcaggtaaaccagcggattccgcaacatcacccatactcacatccgaactatcccatgcagaacgcccaacctgtgcgcctgtccacattacggtattagtttcaacagcaagaccgcgtagttcttcggcaattgctttaaccagaatataggtattctcagcacctttaacacgggttgaagtacagatccccaggtaatcgacaatgatcacatccggaacaaactgtttcttcaatttaagctctttcacaagcgctctaaagtggtttgcacctgcacccgatgtagggtactgcttgaccaccaaacgcccaaccttacccgctttaaggcgctccattttgttcttatagtctgcgtatgtaatgttaccttcgtcgatgtcatccatagtcacatcaagaaggttagcatcgatacgcttagagcaaacatgctctgccatttccatagaaatgtaaagaacgtttttaccctgttgcagataatcagccgcaagagaacataaacccagtgatttaccaacgttaacaccagccatgatgatattcagtgtaccacgttccgcgccgcctttggtgattgcgttcaggatcgggataccaaacggaattttcatcgccttcgattggtaaagcatccaccgtttttcataatcttcgaaatagtcatgacctaccgaactatcgaatgaaattgctaatgcttcctccatgatttcagggatagccccaacaccaggaagtttcttgttctgttctgccagtggtttttctgcgttcgcctggatttcgattgcacgagaaagagcacgatacattgctttatctttgcaatatgtttccgtttccttcattagccaatctaaatcttctggcgcatttttcagcgactgaatcgcctttttcgtgtcttcgtagactacatcacttagatttcgtttgtcaagcgcaacctctaaagcagtttttgacggaatgccgttgaattcctgtacatgtttatcaatgaggtcaaacaaaacttgcgcattgccttcgaaatattcctttttcagatggggccatgcttggacaaaatatgtcccgttataaatcaggttagaaaatattgtatcaacgatcattgtattgccttataccaggttactgaacatcatgaaaaagttgtaaaccttttgtttgaatacatcccataatgtcagtttaggctttgggacaactgaacccttttcaagctctttaatctgtgcataaattgcatcatgcaccagcgggatcaacgcttctttgtcttcgtctggggtactaaattctactttcagaccatgatcccaaaacaccttatgaatataaaccagatgcgcaacacctttttcatcgttaatcagaagttcctgaataacatctttcatcgcttcatcaatataattctttgctttgctctcgatatccatacattgcctcggttatggggccgaagccccatagtttttataaaatttcgttgtcttcttcgatatcatcaaatgattctgggatatcgtcatcatccagatcaggatctgggatgctatcagtgctgtataaatcttccagcgcggaaccatcactgatttcacgatcagggatcttatacttttcttcgatagctttcaagaatggttgatgagtaaacagaggacgccagaattcaacgctatttgtttctgactcacgccatttcttttcttcaacttcgagttcgccagtctcggtattcaggaaagcacggttgcgccagcctttggttacggtctgtacaaagttcatttccattgccagatccagaaggccagaatacatactaataccgccttcataggtaacatgcagcgggaattttgatttctctttcacgaatcgagatttttcgatattcatgatgaaatcataacccaccacctcagtaccttctttcacctgttgtttacccaggatgatcgcagtatcagcggaatacattaaaccagtaccaccggaaataactttcttgctgtacatttcttgtgtgtcatatgtatgacagatacaaaccatcgggatatccaggtcagccagataaggcgtaaccatacggaacataccttttaatgcttttgctcgcgtcatatcctgtttatcgttatcagacagcgcgtcagcaagttcttttttacttgccgtgttgcctactgagtcaacgaatacaatcaccttatcaccgcgttcaagcgcgttaagctggcttacaacgtcattacgcaactgctcgaccgtcgtgatacgagtatacacaacacgatccggatcaacacccattgatttcagataggatttagtaacacctttttctgaatcgtagaacaggcacacagcatcttcatacgttttgagataagccgctacagtcagcaaacctaagttggatttgaagtgtttggacgggccagcgaaaagggtaagaccagaagttaggccaccgttaaacgcaccggacaacgccagattcagaatcggcacacgggttcgcgtgatggtaatattgttgaatacgtcgctttcagaaagtacagatgcagtttggctattcgagtttttgatcagtttttttagtagtgctttgtttgacatttaatttttccgatttattcattgtcattctatatatctcactagttaatgaaaggggccgaagcccctagagtttaccagtcaccgaacagatcgtttaaactggcacgtttttcataatcaattttacatacttctgtgatgttagtcaatggactaataacatgtttttcaaacatacccggataatctacccatgccagaatatcactttcgatctctgctggtagtctatttccagattgccacgcgatgcaatcagcttgccacgggtttttatcccttaatggtagaaccattaccttttcaccttccatgattggtgtaacaccatcaataccagcagtgaaacggttaaagaacaacacccctttaatatggtttggtgttcccttgattggatagccagccccatcacgatatttcgaaatgttgttggcagatgatacaccagcaatttccctgtagtcaagttccttatattcttcttcgaactttttataatgttcgtgtaaagataattcaccttcttgcaggatacggcggatcgcttctttcaggaatactttcacagaggtcggagtactcgaacgctgtgtttccatacccatgattttcaatttcggtttttcatagcgagttccttcggagtcccacacgttagccgcatatcgttttttagcagtccagaaacttcccaacccttcggaacccaacggaggcccagaaatgatttcacgatccataaacatcaggtgttccacgttgttcatgtattcgcaaagttcacgataccctttatcgatcattggttccattctttctttagcaaagcgatccaggaagtcaacccaatggttattatccttaaatttagcctcaccaccaacttttgcaatcacgttatccatacaaacataaatggagtcagtatcacagtatcgaacatatgcatgatccgtagtaccgcacaggtcgttaagatattcgtttaccttacgttcaatccactggatagccaactgcccgaacatggtgatcgcgctggcgtttcgtagatcgaagtatcggaagtgttcgttacccaacgcaccataaagggagttgatagaaatcttacggttaagctgtgctgtgttcgcttgtgcgatcttcttctcacatacgcgcttaactgctttaagcatttgttttgtaagagttttcagaactgctttcgattcatcactgaaatctgtatagaaatcaaagtcaggatcaatcatttggttatgcgcgtctgttaagtgttcgagttcgtgcttgatgagttcaagatttcgctcacccgccatcattcgttttttccacatcttacgctgatcaaatactttcttgatctctactgggatcacgcctttgatatcacggcggaacatccacccgttaggagaacagctaaattcatcgctagggcgcggcgcggtcttattaatatactcttcaagagcacgtaccgcaaaacttcccataatcgtttcagggcttatattcacctgtcggatgatggaagggtacaggcttgttaagtcaaacgataccatgtatttgtaaggcccaggaactggatccttcacaaatgccccagggtaaggggttttagtatggcgtctgttttccggaataacaaccttatcttcacgcagagagttataaatgatcgcgtcccacgttttcagcggagacataacccctgggaagttaatttttgcatagtacgctacagacagaaccagttcaataaagtttcgtttaccgtcgatatcaagtacgcggataacgtcaacaatgttgtacgtgatgtacagttggtgatcgcgctggcgtagttcagacagggaaccttcatactcaactttatttttaccagtttcgtattccgcgatcgcgtccaggcggtaagatggttgcggggtaaagctgaatttcttatacagcgccataccatccatttgagcaacgccggaaatatcatatcctaattgttcgttgccgtaagcgtcagtagtggttctggcggttactttaccaaatgggctaaaatgccttaccacgttttgaccgaaaatgttcaggtatcgcgtgatgatatatgcaatatcgaatttgtcagagttccatccggttacaataacaggggttcgctctttccaatctttgatatacgcagacaataacgacttctcggtctggaaagaccgataaacaattttgtttaaatcttcttcgctaatgtctttgcgatcaacgttttccgcgcaccattccgcaaggccaccctcaaccagatcgtatacatagaatttatcttcaatgctatcgtaatgggtaatcgcatcgattggatattttgcttcacgcggatccggaaattctggggcggtcacctcgatatcgatagaagcaatgcgaatgtgttcgcggttgtattcgatttcattccggtacatgtcagaaatgtaagccagtcgataatcgtccatacctagcgcttccatcccaacatcgcgcatacgctgcatccagtttttagcttctttgatgctgtcaaactgttttttgaggcaaggcttgccataaatgtctttgtatggggtttctacgccattcatagcgtgttgatacattacgggcgcatatttcgtcttacgtacctgttcggtgccgttagagtcaacgaagcgctcgtaaatggtatctcccatttgttcaactgataggtaaaattcattcattggatcttgtcttctccattaatataatgttccattgtaacaccacctacagcaaattcaagtttactcgatgttctaaaaccaacaacccttctgctaacaagtcacggatctttctcagttgaacaagctggcgttcaagtttaaacccgtcgaataacatgctaaaaatactggaattgatactatgatattttgcttctgcaatgccctgattaaccatcatgatagctttgttaaccagtagtttcctttccgttactgtatgttcatccagttgacaggttgcaagggaaaccagatcatcataagcacgttgatcaataacgttatccatacgggccgcgaaaattttattcatgtaagtgcggatcattgcgcgacctccattcttttcataaagacttcttttgcttgttggatcaagtccagagattttttaatacgctcatagaaatgagtggtttcaacttgattgcataacaatgtgtactctgaaatgttacgatcgtaaaatccaggaaagtagtgttgtgcatagctgtaagtgcgggtatctgacagattgcaagttaacgataacaagatgtcatcttttacaatcgggatgatcaaagtttcgttggatttgattgaatccatgatttcgttaatagtcataatatatccctctcaatggtgtacacccaatataacaaagcccctgcacgaatgcaagggctttttgattagtgaccgatccggtacttgtacttgaggatccaatctgctttttgcgagtgggtcagtacgcggaagttgttttcttctgcaaacttcaacccagtggttacgatcttaaccatgccccactcttcgagaagtcgcgcaatgttgttccggcgtagttcgtcttcttccgtcatatcgacttgacgaccatcaagtttcaacagttctttaaaatgcacgataaaatacttaccttgctttttcagaatgtggcacgattgccagagcattttctttttgttgttcgcaataccaatacgggttagcgtttcacggatctttaaaaaagaatcgtcgctgattagttgaatttctaacatacatcaccattgtttaatcaatttttccaatttcttttgttcagctttgtttttcacaatacccaacaaagacagagcgacctttgcgtgttttcttttccaatcctcgaacattccgaggtctttaagttcctgcaaatattccatcgctgtacgtgtatttacactgtatttttcgcgaaggatttcgataataattttctcttcaaaatcttccgatagtttagcccatgcaccgaagcgtttagccttcctaacagagttgagataatagttatagtgcatttggtcagagatactaccgcctaccagattcatcacataagcgttatatatcgtgtctatgtgctggctcattgcgttgtctacaaagtacttatcatacacttcatcgataaccaacggagttttaccgttgttgatttcgtctatgatgttaaacaaggtgttttctttatccttgccgtactctttgatcagttcttcaaccttatcccaatctttagaaagccaagcggattcatgcggggataactcttcttcatccagaaattccgccaggctcatgattacgcctcccagaccatagaaagcatcaggttcatcaacagatattgcagatgaatttctttattcatcgccagcccgtattgcgcgttgttttcgcccacaatctggatcagtgcgattttcgaatcctgattcacgatagggtaaatcgtatcagtcaattttccgataaaggtatcgtattctgacgcatatttaataacctcagagcgcaaccctttatagttcttttctttcagcagggtaatgatatgagacacatcagaaccaacgatctcattcaggatcccagcatcaatttcaccacgtttcgaatagaacccgatcgctttgataatagaacgcgcatccggataatgctctttaacaaacgctgcaatgactttaggatcatacttgatattctcgatttcaaggataccgaaacaacgcttgattaactgtttcatcagttcgatacgttcagcatcagacggaacaccgaatttaacaggaggacaacgagaaagcagagcactatgcacaccgttaatgttgttcgctgttacaataacagaaacgtttttactgtatgcttcgataaagctacgcaagtgtttctgtgcttccgccataccagaacgatcgaattcatcaatgatgataatctttccgcctggtttctgcgtcattgatgaagcaaaacgatccagttcattacgaatgaagtttacaccacagttcgaaccgttgacaaagaacacctcagcatcaacctcacgggccaacacaagcgcgagggtcgttttaccagtgccaggggaatcagatacaagggtcatgttctcaacacgcccagatttgattatgccccgcatagcggctttgtcaccagaaggtaaaatacactcttcaatcgttgttgggcgatagcgctgatcccatgcaaattcatcaggagatcgggagattttaccgtatttggtttcgatgatttcaatattttcactaagttccataatataccttcaaaataaatggtgtaaaagaaaggggccgtagccccttaaaactatcttacttgaatgtgctacttgcttcaagtacgacgacgtaagcaacgccgttatcagaagagaatttcgcggcccctttggaggaaatctctactttgtaatcgctgttgatgaactgcatgttatcaatcttcatatcaaaattgaaaacattgtcgccttcatactcaccgacttcaacagagaaagttgattgactttctttgcttttcgcggtgatgaccagtttaccatcaatcggttcaacggacaggtcggtcagtttcatcatgcgagacgctttgatcagtttttcgaaatcgttagccgtaatctggaaaatcagatctgctactggcatcaccagacgttttttcggtttcgggatcgttgttgcgtctgctgaacgttcgatgatcttcatcttgtcgccgcgaatcacgatttcaccagtggaaatatcatgagtgatttccgcgtcagtgccgacgatgttcagcatgttcaggaatgagttgagatcgtagataccaacatcttcatcaatcacatcagcaatttcagcttctgcgtatacaacgctgttgattgatttcgtcatgatgaatgaacctttggtcaacatgatcgaagagttgatttgagaaaagtttttcaggatatcaatagtttgtttagagaatttcatattcagcctttagttttcaataagtgttacttaataagtgattttacaacggtttccgctgctgtgtcaagcatatcagccatttctttaacggttgtacgcttcggatcttcgcggcgttcgctggtaagtttacgatgttccgcaaccacttttcatcaatgtcacgatagtgtttaaaacgttcctcttgaggcatagctttaaacagttcttttgtttcgtccgagagtttagcaacccaggatttacggacgcggttcatgtagtcaacaaaaacattactttcattcatatatttcttctctaacttagaattctttgagtgggggccgaagcccccgcttgtattacatgtctaacagtttatccaggtcgtcatcaccggagctattagaatcatccagatcgaacggtacgccgtcatcttcgcctaccggaaccgatgcaacaccaccagatgatttcacatcagatgtctgattgtcaaacttagccatttcattatcgaagttgctcagttcgctatcaaggtcagcggaagcgctggaaccagcagaaccgatcgaactacccataactttattgaagcgagtggtcaggtcagccagcggtttgaattcgctttcggcagtaatcggacggagatcgctcataccttcgaaaattgctttctgaacttcttcatcgtcgatgtttttgatcttagccggaacaccaaacgaactatcgtcatagttaggccaatcaccaacttttttcgctttcagggtgaagttagcaccatcaaacggacaggttacagcaatacccggttcatcaagttctggattaccgttaattgcggcggtgatcttgtccatgattttcttaccgaagcggtatttgaacaccttaccttcgttttctggagcgcctgggtctttaacgatcaggacgttagcccagaaactttgtttacgaccgatctggctcagtagcttatcttctggcccgtttttgttggctttagccttctcatacagatcgttttcggaaatgtacttacatgcaggacagccgtcataatcgccgtgggtagaggaacagttctcaatgtaccactggttgtttttcttgaaagagtggctcacgatacggacgaacgccagttcatcatcggaacgtgctgggaggaatcgaataacggcggaaccgtttttctgcgcgtccagggtcagtttccattctttctcatctttctggaagccggaaccacctttcagatttgctacctgtgcctggagtttagcgggatcttgacgtttaaaaatgctgctcatattctgttttctcgtttagtttagtttgattaacgtttgtttcattaagtttcgatattttatgatatctttttcagtaaggtcaaatatttttctgtatgcctttaacttaatgctaaagtcagaccaaataatatcatcagctacttgatcgtgtttatttatgatacctaaaaatgagtcaaaaatcaaaaacgattcgtaagatatcacatttgacaggacaagtttgcttatgtaggacgttgatgatttttcgctgtacttgaacaccagagacacggggatctctttcattttggcgaattcgtacacgtttttaacgtcatccacaaacacgttatctagtctttgtaactttcctatgtactgcctgtaaaagacaatactatcttcatcaacatcgcctacccagaaatccggattggctacgaagttggagaggaatataaaatagatttctttgaatgtaaagcgttgagctaattttacaaagaaatatctatcctttcgcttgttaaaggcgttttcactaactttgatctgccagttgtattgaaggacatcaaaacgcccctggaaatgagttttcatcgccagatataacttgtatacagacaaaggcacaagccgtgaattcgcctcactatcagcaaacggagctttaaatctcacatgaagccgtccagagtggttgatgaactatgttcaagcgcaaccgatgggcgaagcatgtttcctttgatcgcttcgtcgctaatcttatcaaggatcgcgcgaggaaccgttttattcagcatcgcataatcaatggaattttcatccatccattgtagcgttgcttccatgtatgttgccccctcagaggcaaccagattttcgatatacaaaccgacttcggtcttatttccgatcatgctttacgccttatcgatcatatcatacagttcgatcagttcgttgttttcttcttcgaaagcggtacgggcctgttcgtgatacagtttgaacagtttcccgaaggtttttccgtcgataccgaaatcagtttttgctttggatttaatatccttgaaagtaccgttgaagatctcaacttgagttttcacgttggatgcttctttgatcagttcttttacctgttttgctacatcagggtttgtttgtaaaaattctacactcattttgttacctcaaaaatcactcagtttttcgaacatacgggaaagtttgttatccatgaagtaacgttccattttggctttacttccggattttggagtattatacgcttcaataatcgaattttcaatatcttttggtataaattcgaaatcgcgtagttcctcattttctttgtaacgagcggcccattcaggggtcatcaacgttgtcgggtcgtctgcctccagccatgcctctaactcagaggattttaccgctggggcgcgttcgccttcaaccttcgtcacaatataatcatttctaattttaatacaagcgatactatcttttttatcgcctttgatatttttgtatcgcagatcgttacgtggcgaaccgtacttaggcgttacccattttttctggggaggcgaccattgacgaacaccgttatatttctgtagttgtgtaaagtcgctatcagcagaaaccactaatactcgtctaccttcaccaacagcttttttcgtaacaacagcaattatatcatcagcttccgcgaattcaacctttaatccaagataaggcatattctgacggatttcttcgaacacaggattcaggaagttgtttagacgatcccaatcccattctgattcttcgtgttcgatctgacgacgttttttgtagtaccaggctttttgcctacgccagtaatttctgtcatcgaaggcaatcacgatttctggatactcacctttaaattttacaacgttaaaccgtaaagtgtcaagcaccagatgacgaatcatttcgatcgtgatggatgcttgttcctttggtttgaagttgttcatcagtgtagcgatggaaatgttagagatatcgatgaccatagtatcatcgggttccccttcatcttgcatcagcttgttcaagttaaacatgcttgcaaaactgctcatacatacctcaatttttcaaagaacggggttattgtagtaacttacgaaatgaagtcaatacaaaagaccataaaaattttgatcaataatacttgatctgatcaaatttatgatctataatttattaattaataattattttactacaatgatcattgtaggtcaagtactaaaatcaataaattttatataatttagatctgatctatagatcattagatctactttaaccttaaataatatagaatgaaatttgattttgtctacagttattatataatattattaacttcaaagaggaaatatgaatactatgactaaagaaacaaccaatatctacgcagacaatgaaaaattataccctatcctctgtgcatggaaaaagcaaatcgccgaaacaggtgatcgcaaaatgcctaatgagttaggtgctgctattatggatattgcaaacgggctatcacgtcgttacaacttcaaccgttattccgaagattggaaaatggatatgatcgatgacggaatttccgctgcaatctcaggactgcataacttcgatgaaactcgttataccaacgtttacggttacattaacaaagcatgttggcaagcattcgtaacacgtattctgtacgagaaaaaagagaacgcgaagaaatataaattcttccttgagcacgtttacgactgcgaagattcagatatggttagtattgcagacgaaggtttcattcaagatctacatgacaaactatctcagtacgaggcttccgccaccaaaaccaaagacaaggaagcggaagtattcccaacattggaagattttctatgaaagcaataattgacttaaacaaaatattaactgatatcgattacgaaattgacttgctaccctacttcgtaaaattagagttgcaaaacgtgggaatcccggttatcatcgatccaactgacgtaagaaaccccgatttcgaagtagaagaaggggttttgtcttatatgataaacgccgaaactatgatcatggagatcacttatgattgatgaagagaaagaagtactaaccagtgtggaagaagtggatccagaagaggaaattcaacaaaagatccaggcacgtgtagaagccgacgcattgaagcgagcacaaaaattcattaagaagaaccggactgagatcaaacgcctccgtagacatgcagaggaagccctattcaggggtaataaagttcagtatgtgtatgcggttaagaaacttcgtgatatgctcaaacagccgtatacagaggatttcattgatacgatgtggaacacttcactggcatcaattcgaaatatcgtagcttcacaacagaagcactaacaaacaagtagccccgaaaggggctatgagggtcttatgagaaagtacttaatgatcggggatacacacgctggcttgcgtcaggacaacccctggaatgaagaaaacctatacaatgtattcgtgcaaatcgtagaacactgcaaagcaaacggcattaccgaggctttccatgctggtgatttctttgatgtgcgaaaggccaccacacaaaccacgatgaaattcattcgtgaacgtattgtgccactactggaagaagccggattacatatctatgttctggttgggaaccacgattgccagtttaaagacaagatccgccctaactcaccgcgagagattcttgatcagtatgattgctttactgttgttgatgaaccgatgacagtaaatcttgatacttctccgctacaatcaatcgatttgatcccgtggatttgtcaagaaaatacacagcagatttttgatttcatcaaaaagtcaaaatctcaatactgcttaggacactttgaactgtccggatactatttctataagaacagtaaagcggatcatgggcttgaaccggatttcttaaagaaatatgatatcgtgtattcaggccactatcatcacgctaacgaaggcgctaacgttttctatatcggtacacctcttaccatgagcgcgaacgatgaggacgaaaccaggggcttctatgagctatcttatggcgacggtaaacgtgaattaactttcattgctaacccagtatgccaccatcgccggatcacctatccggatcaaaaagatgttgatgttgccgattacaaaaattgctctgttcgtttgattgttcgcgaagttgataacgatttgcctaagtttcaaacaaaactggaagaaacagtttatgagttgaacattgtcgatcgtgtgatcactgattcagaagttgatactgactttgaaatcaaaagcgtatctggattgattagtgagtacatcaacaacatgcagatcactccagaagaaaagaccgaagtatctgcaataatgagtgcattgtatgcagaggttacgagtaatggaaatagttgattacgttaatattttaaacgaagaagggcgatataaagccctttataaaatgtttggatttgatgtgattgttgcagtacagcaggattcctataatgagtatgtgtcattggggttcactctgattaaagacaactatcacgaaacaaaggtttggacatttactgtcctgaatagcatggatgaagattccgtgatatactgctttgatagcacgattacaaacatgattagtgatatatcccaaaggataattgatgaaactcaaatttaaaacattgacttatcaaaatatcttgtcggtcggtaacgtaccgatcgtcattgattttgattcagcaaagaaaaccctcattacgggtaaaaacggcggtggtaaatccaccatgatcgaagcgcttacatatgctctctttggtaagtcatttcgcgatctgaaagtcgggcaactggtgaacagtatcaacaagaaaaaatgtctggttgaactgttgatcgaatacggcaatgatgaatataaaatcatccgtggacaaaagccgaaagtatttgagatctggaagaatggcgaaaaactgccggaagattcagccgctggtgattatcagtcacagcttgaatcaatgttgaatattaacctggtgggctttaaacaggttatcgttctgggtactgctggttatgtacctttcatggaactgaaaacaccagatcgccgtaaattggttgaagatttgctttctctgtctattatcagtgaaatggacaaactaaacaaatcatacatccgtggtgttaaccgtgaactggatacgctttcaatgcagattggacacgtacaacagcagatcgcaacacatcaaaagttcattgacgaacaacgggcaaaagcaaatcagaatacggcgcgttaccaggatatctacgattcccacgtagaaacagcaaaacagattaaagcgcaattagttgaacttcaaacccagatcgcagaatgcgtgatcaatggtgaagaccaaacagcaaatattcaaaaactgcgtgatggctatacacgcctctcaatgaacgtagaacagttgcagcgtcttgaggtgatgtatcgcaagggtggtgaatgtccggcctgtaaacagccaattagccccactcctgaacgcatggaagaaattgccgagaacattaaaaacggtactcagaaacttacgctgattaagaacaagcaagatcagctacagaaaatcatggatgatttactaacacaacaacgtacactaaatgggctgaaatccaaatacgaatcactacgcggtacacttcaaaatgaagttgcagcggctaaacgtgttcgggctgtcatggataaagcacaggaagacgtggtgatcgacgaatccccagttgaaaaactccgtgaagatgaaaaggaacttgattctaaacgttctggatttgtcaaggaaaaatattttagaggtattgttacggatctgctgaaagattccggcgttaaagcgagcatcgttaaacgttatattccttacttcaataaacagattgcgtactatctggatctgttgggtgctgattatcagttcactctggatgacgaatttaacgaatcgattaaatcgctgggtcgtaatgattttagttacgcatcgttcagtcaaggcgaaagagcacgtattaaccttgcattgcttatgacgtggcgcgacgtaaccagtaaaatttctggtgttgatttatctctcctgatccttgatgagatttttgatggtgcaatggatcgtgaaggtgggtttgctgtgagaaaattacttgatgatattgagggtaatgttatagttatcagtcatcaagaactggatccgcaagatttcaacaggcatattactatggctaaagttggtcgatttactaaatgtacgattgtaaacaatgattactaaaaaatgggacgacgaatttcaagccgagattcgtcgtcggttttaccatgtaggcgggattttgtatcataaaacagagagtagaccaacggtgtctgttcctgctggttactattttaaacccggtgatgtggtaaaattcaacaaaacgagaaaaaagaatccgtacttacagatttgtatgaggtatgaagggaaatctaactatctgtacgtgcatagagttgtctggtttttagaatacgggtatcaagttgatcttattgaccatattgatatgaatccattcaataatgatccttctaacctacgagaagccacgacgcaacaaaatcactacaataaaaaaggaaaatctaacacatcctcaatatataaaggtgtatcatgggataagccaacttgtaaatggaaagttggtatacaatacaataggaaaaagatccatttaggatattttgacgatgaaatagaagctgcaaaggcatatgatgctaaagctatagaaatcagcggaaaatacgcgaggttgaacttttcatgaatatgttagaaaaatcttttgaattagaaaccgccccagaaatagagcggttttatctccacaacaattttcttgaagaaaaacatatagttactatgagagatgttgaggaagcattcaaaaataatcctatagagttgacgcgaatcaagaacaacaaaagttctgtttggttcctcgaaaaaatctattgaccgaaatccataaatacagtaaagtagcccatgtaacgaaacgtgggctttgtttttatttgaggaacaataaatgatcactgaatccaaaatgacttatcaggaagcactgaaagttttgggcgcaactggtagcgaaaccagcgctgaaatgtccagactcttcaaacgtgcatccttacgcaatcaccccgaccgtggtggtagcaatgaattaatgcagaaaattaaccaggcttacgacgtagttacaaaaactgggcctagtggcgcacgttctgagactgctggtgatgttcgcgcacgttatgcacgtcaaaagaaagaatgggaagaaaaagttgatgcttactttgtagtggcgaaaaactatttcagcaccaaatttaacgcacaggaatttgcggaatacttcaccaaatacactggattgcctaccactttcaaacaggaagtaacaaaaggtagtcacggtgtttatgcttcgttccgtttcacttctggtgatgcttactttgatttcggtttcaactgcacccctccgaatggacaagggttagccgctccggattcatctgcactgggtaacgtttctgttagtacctttgtactggttggaactaaaaaacataaaatggcaagccgtgattatcaatggggcaaaaacccagacaagatcactccggaaagcctgttcccgtctaaaaaactggaaagcattttcagccctgtacataaaaatatcaaatacaaacgtgctgactacctggcgtcattccgtaagctgttaggcgctgacgttagcggaaacgatatctttgttgaagttggtacactgaaagttcgtttctatcgtcacgtattcatgcgtaaaggtgcgtatgtgtttagcgcggtgtatgatcctgctgtatctaagtatcgtccggctgcacaacttcgcggaactatgttcgaagatgaggacggcgcttgcctggatatgatcgttgatacgttcaaagagttgcagaaactgaaaccgagtgttcaaggcgttgtgaacgcgatcgataagatgaacgcagagtttgcagcgggacatcgttcagcatcttttgttaaacgtgtagctgctcaggaagccgcaccaaaaccagaagagaagccgaagcgcacagttaaccgtattggtaaagaggaatacttcgcagcactcaaagatattggtgctcgtgtaatgcctaccagcggttatgttgaatttgataacggcgctggtgttactatcaacttcaagcgtattgttgtaaaccgtaaagcatactactcattcagtagctttgatttcacgtactctggtcagaaacacattgagtggttgaaaggaatcgatatcgcagaagataccaaaggcgcaagcattagcctactcactgatactctgaaatctttacgtgggatctctgactggaacactgttaagagcgctttagatcaaatgaattctaacttcaaggcgggtaaattctccgcacctcatgtgaagaaggaagcagagcaaaaagcaccgaaacagaaagacgaaatcggcgcacagcctaccaaaccacaggcggctaagaaagatacaccagaagtggaaaaatcacaggctgttcatgcagcacgtgagaaagcgaatatgaacaacactattcgtaaaatgatgactatgttagtcaaagcacagcgcaaagacactccggaagatatcaagaaggaagttgatgcagcaattcaattgtggcgcttgacttattaatcaaatgaattataatgggaactgttaacgcagttccctttttatttgaggaaaatattatgagttgtccaacatggttacgtttggaaaatctgaaagaaggtacacaaaaacggatttatattaatcttggttgggttcctcctaccgattttcaaatggctgagattttaatcaatgctgttaaagaagtaagcgacacttacgaatgggaaaggctctattttcctttgattggtttgtatatgacgcgaaataaatttgaagaaatgaaacttgctgttattcgcgctacgattattaattcccaacaaagatttactttgaaaaatgcatggagttctgaatgattattcaagtatctgtacagggtgacactctgactgtcaccgaatccatcaataccgctcttgctgtatgtcgtgaccatatctcacaaaatcctccagtgactgagatcctggaaattgatgtttgggatcagattgggatgatcgacgcatcatatggatttaccccgcgagatgaagaactatctcgtatcgaatcatggctgaatgaacaggaaacggaatgaaactccctaagaacacaacactactaacccgcgaaaaacttcactctgttgattggtgtcctctggatatcatgatttttgatattgaatctcgcgtgatcaatgcaaaatatcaggggtgtagtattttctctgttgaattcgagaagattcgcggatatgatgagaagtacaaagaaaaactgaaagttatgattgaagcattaggctatattgtaactgttgaagacaacaaaatgtggatcgcaatatgagcatagtaaaagcggtgtttgcattgggaattgatatctatcacgatgatttcgcttttggatatcagcaagggttgccgtggggccactgtaaagaagatttgcagaacttcaaagaagaaaccgcagatagcgttttgatcatgggtgcaaatacgtttacctctcttccgggtaaacttcctggtaggatccattgtgttctgtctggttcaggtagttttttgaaaaccaaaaaaggcgacgttgctgattacgtgatccacggtggcgggttgtctgctgctattggtacaatgcaagcaacacacccagataaaaatgtatgtgtcatcggtggtaaggggttgcttttagattcaatcaataataaaatggttgatgaagtaattttgacaaacatttacggacatcatgtgtataacgcaccagcgtttaaacgtgatgttgcatttactctttctgaactgggtggcgcattattaaaatatgaattttctgatttaaaaactcagtacataaaagaacatgaacgcattgaaaaaatcgtagttgaacgatataaaaaggtataaaatgaaacaatatctggatattattaaacttgtacttgataacggtgttgaatcaactgatcgcactggtgtaggtactattcgtattttcggcgcacaagcccgatgggatctaaacagaggtttccccgcaactacctgtaaaaaactattcttcaaaccgtgcaagcatgaattgcaatggttcctgtccggttcaaccaacgttgaagaacttcgccggatgacctggggtgaaaatagcgataagcgcacaatctgggatgataactatgaaaaacaagctattgatttaggatacgattctggttatctggggccaatctacggtcatcaatggcgttcgtttggttctctttatggggatgatgatagttattatggcggtagtggtgttgaccagatcgcaaaagtcattgaacaactgaaatcaaccccagacgatcgcgggatcatcgtttcggcatggaaccctgttgatcttgatgatatggcattgcgtccgtgtcactgtttctttcagttcgttgtaatcaacggtaaactgtctctacagtggtatcagcgttcagttgatgtcttcttagggttgccgttcaatatcgcctcctatgctctcctgacgcatattatcgctgatatttgcgggtacgaagtgggcgatctggtttggactggtggtgatgtccatatctataaaaatgcggttgaacaggcaaaagaacttttacagcctaaccgttcaccaatgccattaccgattctaaaaatgccgaaggtaaatagcttacttgatttagatcaagaattctttgactcgataaccttagaagggtatcataatcacggctctctaaaagctgaaatggcagtatgaaaaatggggcttcggcccctttcttaacaaggtaagagaatgaatgacattaaagtagtagtaaaatcctctggtgtacgccagccgtttgacaaagaaaaaatatacaaagtgctcaagtgggcctgtgatggtcataatatcgatgttcgtgcattccttgaaaatgtattagaactgatccgcgatggtatgactaccaaacaaattcaacgtatcgctatcaagtatgcagcagatcatatttctgttaaagaaccagattggcaatacgtagcatcgaatcttgaaatgtttgcattgcgtaaagacgtttacggtcagttcgatcctatcccgttctacgatcacatcgttaaaatggttgaagcggggaaatacgataaagagatcctggaaaaatacagcaagcaagatattcaagttttcgaacgtgcaattgaccatgataaagattttgaattttcgtatgctggttcccaacagttaatcgggaaatatctggttcaggatcgcgatactggagaaatctttgaaacccctcagtatgcgtttatgcttattgcgatgtgtctgcatcaggaagaaactgggttagcacaggttacgcatatcgttgatttttataacgcaatttccgatcgcaaactgtctctaccgactccaattatggcgggtgtacgtactcctacgcgccagttctccagttgtgtagtaattgaatcgggtgattctcttggttctcttaacgctgtaacctctgcgatcgtgaagtatatttcacaacgtgctggtattggggttaacgcgggacatattcgcgcaatgggttctaaaatccgtggtggtgaagctgttcatactggtgtgattcctttctggaaacatattcaaaccgctgttaaatcctgttcacagggtggcgttcgtggtggtgctgcaacactgtattatcctttctggcatctggaagttgaaaaccttctggtgttgaagaacaacaaaggcgtagaagaaaaccgcgttcgtcatcttgattatggtgtacagcttaaccagttgatgtataaacgcttaatgaatcgtgattacattacgctgtttagtccggatgttgctaacgatcgcctgtatgatctgttctatgaagctgatcagactgcatttgaagaactgtatgaaagcctggaaaaagatccaactgttcgtaaaaaacgcatcaaagcggttgacctgttccaacttttagcacaggaacgcgcacagacaggacgcaaatacattttcaacactcatcacgtcaaccaacagggtagttttacggttcctgtccgtatgtctaacctctgctgtgagattgcgatcccaacgtcgccgctggatgatgatgataaaatggctggtgaaatcggattgtgtacgttaatggctatcgttctggataacgctgatatcagcgaattcccgaaactcacgcgtattgcagtacgtgcgcttgataacctgctggattaccagaactaccctgtaaaagccgctctgaaagctaaacagcgccgctctctgggtgttggtatcaccaactatgcatcatggttagcgagcaactattgcgactactcagaagcgtatacagacaaagttcatgagctaatggaagcgtttcagtttaaccttctcgttgcttctatggaactggcgaaagaacgtggtgcatgtggattgtacaacgataccaaatacgctcgcgggttactgcctatcgattggtattgcaaaaccgttgatgaactggtagcacctgtttataattgcgattgggaatggttacgtagccagattaagaaatacggcttgcgcaactctactctttctgctttaatgccttgtgaaagtagttcacaggttagtaactctaccaacgggatcgaacctccgcgcggtttagtgagtatcaaatcttcgaaagaaggacactataaccaggttgtgcctaaccagaataaccagattgatttctatgatctgctctgggatatggctaaacgcggtaacaaagggtatctgtctcatgtagcagttatgcagaagtttgtcgatcagtctatttctgcaaacaccaactatgacccggcaaactatgaagacgggaaagttaaaacagaagacatcattgatgatctgctgtatgctaactactacggtgttaaaactctgtactatcataatacgcgtgatggtgctggtgatgaagaagaagccgccgaagattgcgcgggttgtaagatttgattaatgccccttcgggggctttttaaaggtaaagacatgttaacagtaatgaatacaaacccagatcataaccacttagaacaacctatgttttttggtgaagatactggtgttgcacgttatgaatcgcagaaacacaaagttttcgaaagcctgacgcaaaaacagctttctttcttctggcgtccggaagaagtcgatctgtctactgaccgtatgcagtatgcaaaacttcctgaacatgaaaaaatcattttcgattctaacctacagtatcaaaccctgttagataccattcagggacgtgggcctaacctcgcatttttgccaattacatccgatgtgagcatggaaacctggatcgaaacgtgggcgtttagtgaaaccatccacagccgtagttacacgcatattcaacgtaacttgcacattgatccttctgtacagttcgaccaaatccttcgcaatgaagcgattatgaaacgttctgcatcaatgacacggtattatgatactctgattgatgaatgtcataagctgaaaaccatcatgatgctacaggaacaggttagcggctataaaccaaatgatccggctgtcgtgtattataacgagcaatacactaaacaggccactaagtgcaaagaagctctgtacctgtgtatgcacgctgtgaacgctctggaagcgatccgtttctatgtgtcgtttagtttcacctttaactttgctgaacaaggcaagatggaaggcaacgcgaaaattatgcgcctgattgcgcgtgatgaagcattgcatcagaaaggtactcagagtaaaatccgtttgtggcaaatgggtaaagatgatccagaaatggttgaaatctcccgtaggctgaaaaaagaagcaacggctatcttcctggaagtatatgaacaggaaaaagaatgggctgaacatttattctctgttggtgatgtagaaggtgtatcgctgaaaagcactatcgcttatattgaacaccttacagatcagcgtatgcgagcggtagggcttgattcgccattcaccccgatccctaacccgtatccgtggatgaataaatggctcaaaagtgataacgtacaggttgccccgcaagaggttgaagtaagttcttacctcgtcggaaacttgaatactgaaatcagtgatgaagcgtatgcaaaatgggccagcaaatacgcgtgattgtcgggtagtaaacaagtacaaaactgattgggatgtcgatattcaaagaggtacgaagttcggcaacccttatcacacaggaaccaggggagaaaacattttagcgtttatcccctggttccagaatcaggttcgtactggggcgatcacgattgaagaattgaaagaacttgatggaaagaggcttggttgtacctgtgcgcctcttccctgtcacggtgattacatcgcgcatgtggttaatgttttgtgtggtaagaaaagatcacttgactttttggatatataatgtatgaaatctgaattcaacttaacccttgataaatgtggtcgcatcgatcgaagttttgttaagtgtggtgaacttaggcattgtgtttattttattgcaattaacgatgaaatagtatatgttggtaagtgtagggatatgtggaagcgtttagacacatatcgcaatgcaaagtattggagagaagccaaccccagtaacatcttaaaaacgtgtcgattggaaatggctatcaaaaaacgaaaaactgtgaaacttatcgtgactactcacgatgaaaatacatatcatgattatgaaatcaacatgatacgaaaatacaaccctgaatggaataaacagcactatgacaaaggcacaaactaaaattatcaataccctttacaaacaactcatgcagttgtgtggtgaatccgaaacatttttcttcgttgatcaagtaaccgtgatgggtacacctgttcgaatctttaactatcgcatggcctcatatacagactggctaaagcctggtgctctggaatgtcgcggtatcatgtttgaaatggatggagatacccccgtatcaatcatcagccgccctatggagaagttttttaactatgccgaggtaaaggcatgggaagcgcttaacgagtctcctattgaattaggcgaagttttagacgtgatgattaaagaagatggttccttgatctcaactttccttgacggtggatttctggcggtcaagtctaaaggttcggttaaatcagaacaagctatggatgcgcacagcgtgttaatggcaaatcgtgaattgctgacccgcttaactgagatcgctaaagaaaactatacggtgaatatggaatacgtttccccgaaaaaccgtatcgttgttggttatgattctccggatctgcgtatcctgaacgttcgtcataacatcacgggtgaatacatcccttatgatgatctgtttgctgacgcgctgttacgtgcgtatctggttaagcgcgagaatatcgaagtactggatctggatgcattcgcaaaagaagcatatcagaatgaaggattcgaaggctatgttgttctgacaacgaaagggtttgtaaaaatcaaaacaaactggtatgtcaatctgcatcgcacaaaagatagcattaccaacaataaggatcttttcctaaatattgttgagaatacggtcgatgacctgaaacagctattcagttcggatctggtctctctgaaaaagattgacgatttcgaaaaacttttccttgatagtctcaatcgtttgagtgcaaaagcattcaaagccattgaagataacaaagggaaatcgcgtaaagattttgctatcagtctaagcgcggatttgtcaaacgacggtcggatcatcttcgggcctcttatgaagtatttcgaagaaaccgatccacaaaaactggtcgatcgcatcattgaaatgatggttaaaaattacgatcagttcattcctgaacaatataaatgaggttcataatgcctaagatatcatcttgggtatggcctgtaatcgtggggctatctttgatagcccttttttacattgcagtcgataccaaaatcgaaaacgcatcgttacgcaaggatatcaaatctttgcaagatgatgtgaagaaagtaaaagagacaaatacaagcaatactgttatctacgtggaacaaaaatccaaagatcagcagttagtcaaggatgcagggcgcaaacaccttttgtttgagaaacctggattgattgaaatcaaaatcaacaaatccttcgacgaatacatgagaaatttcgataatgaccaatgaagaaaaatgtaatcatgtactaaagtatgtgaaagtagatattgagaatgggatcgcgtattggaagaatccaaccaacccaaaaatagccatcaacgccccagcgggggctaaagataaacatggatatacaattatttgttgtgatggtataaaagtaaagagacatagattagttttctatgttgctaaaggatatctccctaaaatagttgatcataaggatggtatagaggctggagacggcataaacaatttacgagaagcatcacctaccagaaattctagaaatagaggggaaccaaaaacccaaacaggaacaggtattaagggagtatacaaaatatcaaaaaacaatagatatttttcaagtatacgccataatggtaaaggaatatacttaggtagttacgatacagtagaagaagctaaacgtgcttatgaaatgaaggctatggaattgtttggtgaaaattataggagatttgaaaaatgaaattagcaatgatagtattacttggtgtttttctcgttggttgtgctgaacagccacctgttaaggtacttcctacgctacccgcaaaggttaacccagtgaaggtaaaatggaaagtaattgcagacgttagagaaatcgacgggaaacaatacctcgtaatgccatatgatggtaatccttatgttgcattgacatatccagattcattgattttacgtagctggatgaatgacgttaaaagacaaaaggatcaaaccgataatgttctgtgtacgttgggataccctgagaaatgcaaatcaaaataactaaaacgttttttcgtgacataacagaaggaaaagtttatactgcgaaaaaggataaagaaggtctatggatagaaaacgattggaatcgtgatatgtggctcaatctgacgaatgagtataacaaagaactaattgaatatgagatagtgaaatgaatttgtttatgactattggcgttcctggtagtggaaaaactacctgggcgcatgagaaagcccgtgaattgggtaatactgttacgatatctcgcgatgatctgcgtagctctttgtataatgctggtaagggtgctggcggatacaaatacaccaaagctaaagaagaaatgattgcggaaatgcaggatcacgttgttatctccactctgaaagatggtaaaaacgtgatcatacacaacacgcatctgaaagaaagtgataaaaatcactggcgtgaaattgcattggaacacaaagcagattttcatatcgaatactttgatgtgtccattgttgaactgcttcgccgtaaccacaaacgcggctgtgatgcattacccgtttcgcgtgtttgggaaatgtttaaccagtatcgtaagatccgtgggttcgtaccagcaatggaaattgtcaatccccacaatcagaaatgcgtgatctttgatgttgatggtacgctaacaaaagtagggcaacgtagcccgtatgactttaccaaagtgatcaatgatccgccaaacatcccgatccagcaactgtttcacctgtacaaaaatgcagggtataagtgtgttgttgtgtctgggcgtgaaggtaatccgcaatgcgcacatgatacatgggttagcctgttgagttatggcgttgaaccggatgaaatttttatgcgtcaagaaggtgataccaggacagattttgaagtaaaagaagaaattttgtttgacaagattttagataagtattatcctgttattgcagtggacgatagagacactccggtcggaatgtggcgagcaaacgggattccgtgcttacaagtcgattatggtgatttctgattgacatataatgtgggtatgttaaagtacccacacaaaagaggattatattatgaacgttattcgtgaagataaacacatcatggttgaacttggcgatcgcattcgcgtagaaaatctgggcgattttaaccaaaaagttcgtttgttgtgccaaaaaattgctaacaaaattcaggaacagggtaaagctccgggcgggtttgaagttagcgccactccggtttctcagtactcctatattgtgtatattcatgacgtggatactaacagcacccaatctttcgggctggtgttaaatcctattactggctacgttacatgggcggctgtattatgaaagtaaaagtaattgatagagcgatgatcacggatgaatctgtatacccagatcctcgttattatggcggtgttttcggatacatcaaaggaactgatattgatgtagtaacaagtccgatcgccgaatacgatatcaacaaagatcagacagaagttcgcgttactacaatcaacggttcagaatatatcgttgaagcgactcctgattttatcaaacagttactaaaggtgatgaaagatgcttgatcatcctggctctatgagcatggtgcttctggaagcattgaaagcatatgatatcccctgtcatttcggtgaagtaactgttaatactatcgttgacgaaatcgacaatccaaatactttcattgcttgtcttgttcgaaaattcacaagttgttttcgaccgagtccagaaaaagtagtaatcagttctgtttctgcacatcatcgagtgttagatgatggaaagattcaactttactggaaagttctttatcacgtggtgtatcatgaagattgatgatattatgtttatgcttagagcaataagcgcttctaagttctctcaatgtgtctccgttaatgttggtgctgcattgagaaatggtaacgggcgtgtgtttgtaggcgcaaataatacggttgatcctagtcatcgttgtacagatcagtgcaatcacttattagatgataacgggaaactgagtgaagaaaagcgccctgaacattcacaatggtcagatcgcaacgaagtacacgcagaaatgcgcgttattatgctggcggcgtctcatgaacaaatcaaagacgcaactttgtatacaactcattccccttgctcacaatgtgcgaaaaatatcgaattttgtgttgcaacaggtatgattaagcgtgtagtatatctacataaatacgatcgtggtggcatcgagtggatatggcgtctacagcaatacggtgccgaagtagtacaacttgatcccgaagaattgaataaacatttccggattaaataaccaatgagtaaatgtatgtctgaactgagtgtaaaagcatcctttgaatatgttctgattgaaaccaacgctaaagcggctggaactgaaattgtatcaccttctggtattgtgactggtgttcgtcaacacggcgaggaaccgatctacggcacagtgttatcatgtgggccggatgtaccggaagaatataaaaccctgcttatgggtaagcgtgtaccgcttcctcatgcacaaatggcaaacgtgccggatcctgaactgattgcaggaaaggcaacaaaagaagaagctcgcaagtatccggttaaatatgtaaccgcacactataaagcgattcaagcaatttacgaataagagatccaacatggctaaacaaattcaagcaatcatcgccgataccgtcgcaaaatccaaaaaacttttcgacaaaggcgacatcctcgaagcaccgacccgcatcgatgtaatgacttcaatgatcattgatgctcaccagggaaaactaaattcccgtgcttcggaagtaatggaatacatcgtacagttcgaggatgtatgcaaatacgccaaagctgttgatccggctgttcgcgaaatctaccgcaaacagttctaaaaatattggccccttagctcaataggtagagctaatcactcataatggttaggttcccggttcaagtcacgggaggggccaccaaacaaggcaaggcacttagagaagcgggaggaacagaatctgattctgttggttgtaggtgcaaatcctacccttgccaccaaatttgggtgcgtagcgcaatgccgttaaatggttcggaatatgcaaccttatccacaggaaaggctctgttggtatccggtaataggttccccggaatgcggggtgaagtaaagaaacttccagcccactaattttaatgaggtttatatgaaatttcgtgaaactgtgaaataccataacgcggtcgaatatacacagatttttgttgatatgtctcccgcaaaattcaaagaacgttatggcatgacatttaatgaatggaaagatggattgcccgatggggattaccgaaaaaacttcaaattcagtgaatgttatgtggatgatgacccttacgatctggatgtttgtagtaaaacaacacctctcattgagaattcaccagaacagctttacgaatcttgtattgattctgcatacgaaatttaaagagataacatgaaaaatttacaaaaactgtttaaaatgtctccggcaattagaaaaatcatcggagaaagcaatccaacgaatcgcaataaaaaattgatggaactttttgtaaaagagttcgatgattttgattctgaacttcataaagcgcttgaggcatattccaaacaagggttctttgcatcgccgcaagtgaatagtaagaaagagtatagcgaacgattctttgattgggagattgtcaatctcgttcgtagaacaaatatatctccgagcaatcatcaattgatttctcttgatacttcggtattctttatccagtatcttatcagtggtggtttcaaaaatcctgaaattccgtttacaaatgaagcggttagcagtgaatttgatgaatcatttgtatacatcaacacaaacaaataatcaaatggctatcttcggatagccttatttttggggtgtctatgcgctttttaaagtatgcaagttggatcgtactcgtccctcttgacattattactggagtattagcaattctgtttgccccgtttgttgtaccattctacaacgagaaaacagggcatcttcctaaaggcttccggtggatggaaaccttcgataaccctattgatggtgatggtggacatatccgccgttgggcgtccatacgctatcatctgggggcttttggggtgtacatgcaacgtgttggctggttgtggagaaacaaggcttataacttcgcatatcacgttttaggacgtgaagcgacaagcaaattcaactggaaaggcaacccaaaaacagaaggtgggccgaaccctgtaaatcatgggtatctgctcatgtggaacgaatcagcatggggtttgtacgtttacaaaccgtggctacggatccacaaagtgcaattctgtttgcgcgtttatgctggatggaagctgaaacaagaagttagcgacccagttaacctggatcgtgcaatgctggcgtttcatttcaacccgttcaggtattatgtaatcaagtaaaggtaatacaatgaaagcatttcaaattttagaaggtttgcatactggtacgatctatctggaagaaggtaacgatgttcggatcgtagtatcaaaaacattaactatggattctgtgatcggcaaagctcgcgttactccgtttgcaaagcgtgagatcgagatcgaatatcagccaactgttaaggtggaaggtggacaacatttaaacgttaacgtgttgcgccgagaaactctcctggatgcggttgaacatcctgaaaaatacccacagttaacgatccgtgtttctggttatgcagtgcgttttaactcactgacccctgaacagcaacgcgacgttatcgcccgaacctttacagagagtctataatggcaattgatgatatcaagggttataaaccccatactgataaaaaagtagaaacggtaaaccgtatcaaagatgctgaaaatgcattaggtgcaatcctggaagatatcgaacagcgactatcaaattcagatattgattcactgatagaggaagaattagatgaggtgcttgaacgtatccatcaaattcaactagcgaaagaccgactgaaagaagcctctatgtgggcgtgtcgtgcggtgtttcagcctgacgaaaaatattaaaaatcaagccgttgccgaaaggtagcggctttttcttttttggtgtaaaaagttgttgactcccttctcacattcccttatagttaatcccgtagacaagaaaacacttttatgaggatgacattatgaaacgctcttacaacatgaatgaactggttttcttcaaaactcgtcgtgaagcacgtgcttacgttctggcggctggtaaaaatacttctgctgctatcgatatgggtactgataaagctgttggtgctcgttgggccgctgttatcgttatcgctgctccggttactccggttaaaactctggtacttggtgcgcgtcacgccgaaactcttaacactgctgcaagcggtaggggccacgaagttaaagtgttcaagaagcgttcttatctttcatgtgcaaggggttaactatggcacgattcatatataaagtggaatacgaaaatactgagttatctgatacctttttgaagatgattcgtgatcacgggcaacgtctggaaagagtaacgattgatactgcgtttgattgtcctgttgggttggttctaacattatcttgcagccccgcaaaagaatcagcccgtgttgaaatgttacataaactaaatgcattttatgaaggtggtagtgtatggcgagtattgtaaaatttttcaccgactcagtgaaagaaattaaaagcgctctggaacaatggaacactcgttgtgatgtatccattaaatcagagtacgaaacaacttatgatcgttatgatccggcccgtggtttgcacaataacccccatgaggtggaagtgtgaaatactacggattcaaaacgagtcattttggtaaagcgtatcgtacagaaaacatcgatcgcaaacgtccgtactatgattctttagtacgcgcgggacgcaaacgcgctcgccaggaagggaagaaagaaggtgaagatcgtggataattggaaaacatgggtatcaattatcgttggtgttatcatcggtcgcggtttgtatgatttaatattttcggcgggggttcattatggacattggttcgggtagtcagtacccatcatgcgcgttaagcaacttcgctccgcatccgtttacgtttgacggggtagaatgtgcatcaatggagggctttttacaaagccttaaattcagcaacccagatatgcaagcccatgtatgtactctggtaggcaaggccgcaaagttcaaaggcaaaaagaaaaaatggtggactaaccagaccttatactggaaaggtatccctattcatcgttcctctgaggcgtatcaaatcctgattgaaaacgcatataatgcgttattccttaatgaagggtttcgccgtgcgctggcagcaaccggaaaaagtaccttgacacattcaatgggaaagaataagatgaatgaaacggtgctcactgaacgtgagtttgtccgaaatttaacccgattgagagatctgttatgagtgaaaaagaaagagtagaatgcgtgtttctgttcaaaggcgcgattaatccattagcgttactgtatgcgcaacatgcattacgttcaacgttgattcagagtgttatctataaagcaggtgtgtattatgttaccatcggcgcaaataacatggttgttattgaatcctatgttaaggaatgtgcatcaaacggcgttgtctttgataaagtcgattttgatgcaggggtagatgctgtttatatgtataagggttgatatgagttacgtagtttatttcgattgttcggatctcgatccgttcgtgcttcaacaggcaaagaaatatcatcaagatgtcgttggcattggtgtaacaaatgatgatatgttgtgcatcgaatttgaatattatcggacatttgagcgtgaacaattcctgggtgaattgaatgcattcaaaagtacccttttctttgatcgttatgaggttatatcttgaaacctgttattcttaccgatattgacgggatcgccgtaaaatggcaaagcggcctcccgttctttttgtctaagcacaacatgcctactgatattgcattagaaatggttacagatgaaaaatttcgtgatatgaccgaaatcttcggatgtgatcagcagttggctaaaatccttatggaagaatacaataacagttctttcattcgttatctgaatgcgtatgatgatgcattgattgtgatcaaccgtctgaaaacgcagtatgatttcgttgccgttaccgctctgggaacaacaccaacggcaagccttaaccgaattgctaacctgaatactcttttcccgtctgcgtttaaagaggtgatggtcgtgggccacggtgaaacaaaaactcatcgttacctggaagcaaaagcaaagtatggtaatcgtctggtttgctttgttgatgatctcgcgataaacttaaacgaatgtcataacgtcattagtcagttgccgttattccatatgttacgtggtgaacgtgaagaaacaaatgcacctcaccagttagtaaaatcgtggtttgaaattgaagagaaactaaatgatcttgtcaatccttaatgaacttgcgtctactctgaaaaccaaagagaaagaagcaattttaaaacgtaatgccgataatgaattattgaaagaagttttccgcattacgtatacaaaacagattatgttttatgtgcgtcaatttcctctggtagaagggaaaccaggcacaacaccgctttccgatgcaatcaaagcattactggaagatttagcaagccggaaatatacaggcaatgcagcgcgtgatcgtttactggatattgtatcatcagtgaacattaacgatcgtgaagtgctacgccgtatcattaaccgcgatctggaatgtggtgctggcacaaccttaccaaacagggtatggaagaaactcattcctgaacagcctcaatgcctcgctacgccgtttagtgaaaaggctttacgtcgcatcattttccctgcttactcgcagcttaaagccgatggtgcgcgttgcatggctgatttgctggaagcattaaaccgtaaggtatcgagagcgggtaacgagtacgaagggttaactcagcttgatatcgatctgaaaaagattcgcgattatctgggatatgatgtagttctggatggagaattgatttatgttccttccggaaccgtaccaacattacctgaacctgaaacagacatgcctttttctttatctgctttcatggacgatgatgataacgacattgcgttatttgcggaagaagttcgcaaagtatcgtccccagaagaagaacaggccgaagcaaaacgcgaagaagggaacgggatcgtaaacaaatctctgaaagggacgatcaccgaagaagaacagcgaaacattgtttatgttgtttgggatattattccatatgaggtgtattacggcgaagctgaaagtgttcagacttatgatgagcggtttagcctgttgcgtgatatcctcctggatctttctctgccttctgttcgtttgattcagtctaagctggttaataacattgcagaagcgaagcaggactataacaattaccgcaatgacggtaaagaaggttctattctcaaaaacagaaacttcaaatggaaagattcgcgagtagccgatcaggttaagctgaaaaacaaaaccccgattgaactacggatcattgatatctacgcgcacactaaagaagaccataaggtcggcgggtttgtggtggaagatttatccggaatggctcgaacgaataccggatctgggttaactgataccgattatcgttacgatgatgatggtattacccgtgtatacattccattagatgaacgtggtgaactggatcgcgaatacatcatggcgcataaagatgaatacattggggccattgtagaaatggaagttgacggcctccagaagtcgaaaacgcgtaagaaaggggaaccggaatacagtttcttccttcctattatcaagaagataagacgcgataagaccgaacccgacgatattcatgttgtctttgcagatctattttaataaaaagcccttgactccggtcgggggctttgttatattgggcctatcgaaacgtaaatcactaagagaatatattatgactagtagttatcagaaacacaaaacccttatggcaaacctgtccggtaaacatatcgacgaagtaaaatctctgctgacagtgaccgaaggttcccgattcgaaacaaatcacattatcaaaccttctgtgaagaaagtactgaaagtgatttaccgacatccggtgtatcagtgcgttcatatcatgaacagcaacgcatttattttcgtatataacgaatccgatgataagtgtgttggtattttccgaaaacctaactttgaatgcatgagcgaagcggctgttgcaaccccgatcgttgaagaatatccggattatgttcaacgcaacatgcgttatgtgcaatcccgacttgattatgcatacgatttcaattctgacgcggtagaagcgctggcggatatcctttgcaaaaaccagaaagatcgtcaaatgacaaaatatctgactgatccaacaccgccaacaattcgaatttctgttgaagttccgtttgaaaatcatttcatggcagttgaagcgcttgctaaacttggtttagaagtgaaaacagaagccgtttaatagcactttttgttaaagaagcctcttgcaatgcagggggcttttttgtatagtgtgttcattgaaacgaaacacggagataaacaaaatggctcacatgatgaagaaagcagaattccttaacctggttaaagattgcggattcgctcacttgaaaacttttcgtggtagtgtttacctctatgaccgcgaaatccaggttgccgaagtctattgcgcttctaacatgcaagaatctggcattatctctgcaatgaaccaatcaatcaaataccgtaaatggatgggctgattatgaaagttaacgtttcttatgaatctcgcgttaatggcgcacagtggcggaagctggataacggacaagtggaaaggcgcttacctggttccgatgagtggacacttgcggcagtgttggaaaccgaaatcgatctggcaacaaaagacggtattttgtttgaggtgaagaaatgatcacactcagtgattatcttctgtttactgctctttgggcggcttcgatattcataactgctttgatttacaataaacgtgatgattttgggttgtgggtattcattcacgggtttcctctgtctatgtggatcgtgatgactgctgaaattctccattaatagcactttttgctaaaactatcttgttcttgtttggtatattgtgttcatcgaaacgaaacagacaaaaggaacatcacatgaacttcatcgatatcaacaaagatttagaaggtaaaaacatcaaactcgttaaccgtgaaatgttagagagtcttggtaatggcggcgaaaaattcagtgaagaattctataacaatttatcgttgatgactgttaaacgcgttgatgttcagggtggttctggttgggtttctgcaattccggtttccctggtagatcaagcaacatatgacccagttgccgattcatgggatctagaaatgccgttggtattcgaagaagtcatgaagtgctacgaaatcgcataagggtattattatgaatagcggaaaattacaaatgaaagttagcgaagaagaagttaaagagcggttatcggtagcaagaagattccttgaatctatcgaccctgataaacttggaaaatgccctgatacgatttgccttaattgtgggcgttctgttcttgttggtaagtgttgcgataatccaaatatagttgtgatggaaaaggaacaagtatcccccgaaacatgggatcagatccaggaaatcattaaaaaccctccagcgccaaccaagaaattacgtgaattgatgacaaggaaaatgaaatatgagcaaatttaaattgagtgcaaccgttcgccttattcgttggaatggtgaagagatccgttatgatgaccctgaattcgcccatgaaattctttcacatcgtctgggattgaaaaacgcgtcattggttcagactgttaaaacatcagcagatccggaaatttggcgttgtgttatcctggatctcgataacaacattgactatgatgatcctaagaactatccgcttctggaagcacaagttgagaatgctccagaagacagacagtgttttttggttgagttaccacgcgaacattacgaaaacatcataaaggcccgtaaaaaggtcaataacaatgttttcgatctccacctcggattgtttgaggattaagtactgctagttgtgttcgtagtagcggcgctggtaggttcccccacctgtatacattcaagtgtttgcaggtggaaatcttttgatacgtctcgaacacattcaacaatcagatattttcctgcatactcttccccaaatacctcaatgattgtccctaccttaacatctaaacgaccctgctttatatcgaatcggatccggcgttcatagctggatagcaattgcattttagaagcctggaacggtttaccttctgaatctgggttctgaaagttggtatcatagattgcattacggtttgtgaagatccatgtattctctgtgtctgtatcagccagtatatcaccgtacatctttttatcagtcaatgacagactaaagaaactggcgtctttaaacagcgttgtgttatccttatgggtaatgtactgggcttctgtgaatatgacagtatccccaacaaacacgttatcaacgttaaatttgtatgctgggatcggtgtctgggccagaatgtcagttgaacttttaaggaaaataccggaaccatcttcccacagataacagaagtcagaagaaactacactttgcccgttgtccctgatataatcaaatatatcctgatatgtaccatttagacatccaggagggatacgtatgttaccgccgacaacttcgggggtaagtagtttcattttgctatacagtgccgtcatacactctgtaatcgtctgtacggcgttgttactaaatgaacgggcaaacttacgtctgaacgttttatgcagcggagagaggttcatacgcagcacagaacggttcttatcgtcagtatctacgttagagtaaagcaatccgtaataatgttgttcctgtgtaccgttatactggaaagatacctgtatgatcggctggataagttgctgatagattaactgtgcgtcgtatatctgcatcagcgtttccgatgagccgttaatcatcgtcttttcactaaacgagacaagagcgggtagcaattcagtatatgcgttatcaatgtatttttcgtatgatgtatataatttaatcgatgtgactcgattgacgattttttcagccataaaaatccctcctaatatatcctatttactaaatagtaaataatgacccaggttcaatttgaggcaataatgaaaaataaaactcttgataaatttatgactacacggcttgaaatcaagaagactaacgttaaaaccgttcatcttccggatggaacagccattgagatccctaagatgtcgtatcgtcattttgtaaagattaagactctgaaagatgacccagttgcgatcatgcgattcatcattgatgacatcaaaccgcgtgaactgacagcagcggaaattgaatttgtgttgatccatatgtatgcacacaataacgctgattatgccaatacgcttaaagaaattgggctaaatcttgatgacctcaaaatctccgaaccttgctatgattttacgtttgacaacgtgcggttagtctttgacaaacccagcctgttaaatgctcaccttccgttcctcatcaaagaggcatatgttgacggtaagccagtagaattaactgaggataaacgagacgaattaattaattgcctgtaccgattcgaatatgatcaggtatcgcgtggtgtcctccaggaagtatacattatccatgaggggaaaaccatcaaagggcttaacatcattggtgaatgataatggctaactcttatttcaacgaagaacaaaagaaaaagtttctgaacagaaacagcaacaaacaaccagcggtcaccaaagtaacagcctcccttgatgctgaaagcgcccgtgacctaaaggaaatcaacgataacacccttgaaagtgcaatcaatactcttgatatcaaagaagggttgaaatcgttcgaagaaaaattccgtgacaaattcgcggggttcaaagaacaatacgaagaggataaaaaggaatcattagccgaacaactacctgatttcgtcggcccgatccgtcctatatccttaaccgatgataactcaaaaactgttgacaatacagtaaacgttaaccaaaatggtcagttcggtaaactggaagaaaacaccgaatctatttttcatgctattaacaaacttgttgatttatatgaaaatactgataagcataagccgcttcctgaaccagtggaagaacctgatccgtatgtagacactaagaaaaaacgcatcaatgatgatgatgacaaaagaagcaaaactctggatagtattgctaaaagtctggtttctattaaaggttttacatcgcagatccttagccgtttcattggttactctctggaagcaatggcaaagtttgctaaatggacgctccttattggttcgttaatctttacattcgatgtgttgcgcgtcacaatacgcaaatggttcgaagatatcctgaaagaaggggaatcctcaaagaaactatttggtacatatctgggtaacgtaaaggctatcgtaacaaagatcgaagaaggtttgaacaacttcaatatgaacaacttaggcgaatcacttcgtgatttgttcgttgagcctatgaagttgttggggcaaactgtacaaacggcaatcactgagggtatcggtcgtcttattcaatcattgggtgaatcaactggcatagacagcattaccaatgccggacgcggaatgcagatcaccgctttacgtgataaacagaaatttggtcttgaattgactaaagaagatattcttatgatcaagaaacaggaactagaagaccaaaaagcggcattagaaaaagaagataaagctattgcagcacgtcatgcattaacaataactccttctcaaattcctaatggttctatctataaagttgctcctactgattatcaagaaagaaatcagaaaaccgtagatgctgataaagaacggcttgataatatgaagaaagcaacggaagaaatgcagaaacaatacgatttagctaaaagcagcgaagaggaagcacaaaaattagccgatgaggaaaacaaacgcaaccgcgcacgtatagaagaagcaaaaaggttagaacaagcgaggaaggaaggaaaacagccgccagaaggtgaagagaaaaagggtgatgatctgttgggtaaagcaaccaactatgctaactctgaaaatctggatgcagccgatatcaaatacattaacgatgaactgttggatcagcttgaaaaacgtcgtaatgaaggcaatctggacgatgtacagaaggatagaatctctgaccttatcgagcaattgcaaaacaagattgcagcccgtacagaatccagcgccccgatcgacgcacagccaccgttagcagcaaataaaccggatgctgataaagcaagcaacattcaggttaacaacaaaactgttaacaacaacgtaactcattcagtacaacgcacagagcataaaccgctcgtagcgctggcataaggaacatataatgaagttttctattattgatgacagtataaacactctcaaaaatattaaaaatcgcggtatcccctctgggggtgccgcaatcacagaatcagtattaaagcaaactatcgttaccgccgaatttccggcccaacgtgcagcaggtatcgataacgcttataatgcttcgagtctgtataataacggccttctgttcactgcatatgattttaatggtgttggtagtaaagacaactatcgttcattacgtcaggcagcacagaacccaaaacaaatactatcatctgcgactggtaatgttaagtacaaacaagtgttgaatagttctattggtactatggaacctgtttgccagatcctgctaccgcgaagcctgaacgataacgaagtaaacagccaccgctatcaagatgcaaacgatagtttcttaaccaaagggttgagccgtgttgtttcaaacatggtatggggcgctgtagaatccgtttcaggcggtattatggcagaccgaagagaagcccttgatgttggtactaaagccgctttccagggttctgacaagcgaacaaagatgtattacaatacattcgtgatcgaaagccgtaatgatttgctggaactgattaaaatctactatctgtttactgttctgggatatggtacaacttctggcggtactgctaaagaggttgctgcattggttaaacagtattacggtgttctgggtgctaaaaccgctaacgcaattagcccttccagtaacccagtaacagcgtcagattttgataatagtctgggtaatgacgtggttgatttcatttcaaacgtagaggttattaaatcgcctcctgtctggtttattcgtgatttccagtctggggattccttgcgtttacctcattcaacctttgggccagcaggtattaccagtgttcgctttggtcgttctattgataatattgtaaatacattaagagaatcaccaaataccccgatctcacttgaggtcgaaattcaatttatggaactgatcgatatgcgtcaggattctatttttgatacaaattactaaggagatatgatgttttacaacgtagatgaatttttatcaggtatggctaatcgcgattttcagcgtagcaacctgtttagcgttgtatttgcaaccagccctgcatcacgtatccttgacaacacgatcggtagtattcgagatactttgattgatggatctattagttctatcaacgcaaacaacccgaacgaattcattaatgctatcactggcggtgtgagtaaattgtttagttacaccgtcgataaggcgattatgtcgctgaacaaaacaggatttagcaaaatcatcggggcaattagcccccgcttgattacttccctgtttggtgatagcatgtatggacagttgttagctgaattccgtgataaaatgatgtataatatgggtttaagcatcatgggagttaacctccccggtaaatccattgggtacgaatacgtttataatggtggcgtacctcaaatcagattcactcgccctgagaatggggaattgtcgctgacgttccgcaccgattcagaagcccgtaacctgaaaatctttaacgaatggatttccgctattcgcgatgatgtaacaggacaatacgccttcattgatgaagtgacaagtactattcaggttaacttacacgatcgtgatggttcaccgcatacaacatacgtatttcagaagtgcttgcccgtcaaaatcagtaacagtgaattgagctatgagaacaacaacgaaatctggacatttactgttgattttgcctataaaacatcatgggttgttgaggctgataaagaaggctgggaagggttcaaacaatccgtagaggaaggtttagccattgcagcacgtaccgcaattacaggacaataaaggggctacggccccttttgaggatcttatgtttgatattattcgagtaacattaccatcagggatcaaacgattccctatgtttacagttaaagaccagtttaaattaatgctgacccgtattgatatggaaggtcggccccttaaagagcaacaggaaatactggatgaagtgctggatctgctttatcctgggtattccaaaacagaacaggaatacattttcagccgggtgtattgtggttcgttcggtaaaaacgttatcaaggttgtgataggcggtaaaggtgggggccactccgaagccttcatggtgattaatgatattcaactagaaaatgaatacaagttgaatgatgaaatcacattagggtttaacttcccccgtacacgcaatacaagcgaagagttgtttcttgaatgtatcagttatgtaatatacaacgaacagcgctatgaatggacatcactaaccgaagaaacgaaagagaatattcttgatatagtcgaacttgatgatgtcgaaaaaatagttactatgctaacgaaatcggttgatgtgtctatgcgcggtaaatcatttagtggtatgttaaccctgttcaagatcctgtttagtcgcggggatctggatgaatttgtgaagaccaactatctgctaaataaaaacggcctgaacctggaacctatcatgaatagtagcccgatggaaaggcaaatttatactgcattgcttgcagaagacttgaaaaaacaaggtgctgttaaatgagaaagcatgaatataaacacgttgagaaatataatgttgattatcgtcctctgacacatacagagtttacccccgatgtagattttatcaaaggggatgtttacctgtatcaaagagaatatcttttcattctggcacttctggaaagtaaaaatattgatacccgtcaactgttcatcaactgtgaagaatgtcaggaaagaattgaattccagcttaaacgcaatcaaataatggttgaagatttcgacgataagctatacggcaatgacgggatcgcgttatctgttcaccctcgtaagactggtgatgaagagatccccgatcttatcgattacgtaatgatagacggcgaacagatcatgtggagtgattgcagcgacaaagataaagaaatggtgttggatgcaatcgactatgcaacctataaatcgatttctaccgcactggataagccagcagtggtcgcaaacattccggtaaggtgttcgtgtggacatagccatatcgtctctctgagaggcttacagcaatttttaaaggtggtctaaatgggtgtaaatctgaggttgctatatagcgatatagaacctaacatgcaacgagattggaataatgacgtagcggcctcaaaaggggccgcagcagtgagaaatagtttgattggtatcgtaaccacgatcaagggtacacgtccatttgatagtaactttggttgtgctattagtgatatgctgtttgagaacatgaaccctctgacagcggaatcaattagaacttctatcgtatctgcgatccggacatatgagcctagagtatataatctttctgttgaagttattccacagtatgatgataactcagtaacagtaaccatctattacagcatcattgatgacccggatgacgtagagcaaatcaaactacagctttccgcatcataacaaaaagccccttcctttcggttggggctttcttttagaattcaatgaatcccattagtgtttgatatcgcaattcaaacggggagatataactttgcatctggttttgatcggatacgatgtaataatacacctcatcattatcatcatatagcgcttctttgatgatgcaataacgatcggtttccacgttcacataaagagtatccatgtactttgtaactttggaaccctgtgaactgatttcacgaatagcgttatctatgaaaagcgacaatgcttgcatgaagttatcaaactcaccatattcacagcccataatagaaattgcagtgtattggtgccagcctttgattgtgtctccacggcggatccatccaatttgtctacccccgatagatacacaccacactttaccaacgggactatagaaccgcacaacttcttttaataacagggacatgatcccacattttgtataaggattcatttcaacctcatttcatatcaagtagccaggaagggctagtttcaagcgaaattgcagtatattcgtattttacagtataacctttgaaaccgaaaggaatgactgcattttcattgagatattttactttatgctttgcttcttcttcattcagagcagcacagactgttgtttgttcaacgttaccagcaggagaagtaaatttttcaatgataatgtatacgcagttcatcctattgccctctttccattttttcaagtttcagtgtatccacttgtagttgaagtttaagaatacaacctttcgatatgttatacaagtagtcactaacgatttttgactttacctgatcgtaatcagaagataacgtaatccaatcatacatcgtttggtatgatggaagatacgtacattgttcttcttttgataacgctttaaatgattggtaatcggttggaggttccgaagcaattgcggttgtggtcataagactaagtgcaagtagtagatatttcataatgtattcctcattgttttcgatagaaccaatatagcaaaaagccccgaccgaagtcaagggctttttcatcaatgcaagaaagatttcacgtactgttcgatcttttcacgacatgtatcaactgaggtgctttccgcaattacggcatgacataacgcctcgcctccgacccagaaactcatcatgtactgaatatcacgaccttccatttctttttgatgcgctttgattcgatcgaaagcgttttcgattgtttcagtagcagtaagcatttcggattccccgtcaacctccgccagttccccatcgatcatttcgctttcgacttcttcccagtatactatcgttatcatgcattaccccagtggttaaccgtcgtaatccccgccacaattcacatcgccttcaatgaacagttcgcggttatcacgtaataaattatactttctttcgagttcaggcccgaacgcgtcggcgtcttcataccagctataattgtatcttccgcattcatcatcatattctggttcatcaccgcgctcgttgaagtgaacaattttaatatcgtccatccccagttctttcagcttatcccagatatacgaaatctcaacgctatgggaaccgaacgcttccagtgagatcgtaccgtcgctatcgacttgaggaacaccccacttcgaacgagtatcatcggtgatcatatctattaatgactcaatattattctcaccgtagatatcagcaacttccttttctttaccagggcgaacaagtccgatcccgataataaagctactgcttgagctattgctcacaaacccagaacgaattttcatcgcatcaccatattaccaatcatgaatagagggattagcgcgaagacgataccccatagaatgaccttatcttcacgacggtcacacccataatagataacacctccagcgaaaatcaatacaacaactgaaacgaacgcgaataaataaatcatttgcaggtatccattctcatagaaacttctttcaggatcttattcagatcgtgaagcgcatcttttacgttaccttcgttataggtaagcatatcctggtacagccctttcaagcaacgattgattacatatgctttttcagaaggtaacattgtaccagagcgattataatctctgaaaatgtccatcatcgtgccgttgttaccaggtaatgacgggttgaagttaaccataccggacatcaaactatcaacatacacaactgttgtgttatcagaacgatacgcgccaccaactttaaaccagttgctgaacacatacggagattcccgcacttcgctcaaatcggttccgatttcatcgatgtttacacgaatgttgttaaaatacaccgattcatcaatagaaccatgacgccataagatagcaccattgttatttttgaatccgactacatcaacctgccagccgttatctgttaaccggacatcatcaacgacgatgaaatcaggtagctgtgaatgaaagccgatgttttcaggacgggaattacgaaacccatcacgattggagaaataaaggatgtcgccttgattcagttcgcatatattcataagatttttaaagtccaattcaagtaattccacaagtcacctcaaagccccctttcgggggcgagatctcattagagtttaacttctttttcttccagaacgattgtgcaatcaaatttcacatctttccagaattccgctgcaacgatatctgttgcggtaacgcttacgctggtttcttcgaaatccagatccgcaaaccatgcgtgtccgacgacaataccgtacattacacgactcaggcgattattaagggcgcgaacctctttaatagtttcctttgtctgcttatcaagatactcgatcaggtcattcttgtcaagcgcttcgatctctttagatacggtatcgtaagcccacagaatgatcaggtcgccattgttgagtttcttcttaccttcggcgcgttttgcaacggtagccgcaacagccggaagtgatgaaacgcctttgattttcacgttcagttctttcgacatgtaaacatcagtcgattctgtgcgctcaaccttcggagagaagccgtaatcacggatcccttgctcagacaaccattcaccagccgcctcaccaaagcgctgtttaagcccttctgcgttgcgtaaaccaatcgcgttatcacggaagaacttcattaccttctgacggcctttcaggatttccagacggacgttatcagcaacaaattccttaccagaaataccgcgagtcatcgaacggttaaccagaggcagagaggtaaagtcaaccagtacagacatacggtcttcaccaattttagccagcggtttgatagtcagaccagaagcacgtaagtttttcagagtcggaatatcggtttccagcggaagtaccttaacgttcacgataccatctttaacaatggtaaagttacgcacttgtttggtttctactttttccggcaatccaaactctttttgtttgctttccggaatggttacataaccttgcagatccgtattgatggaaatgttcggacgggaactgttacccaccaggtgtttcactgcaactttcgttgtggtttgggtaaattccggtttccatacttcatgcgctaccagttgcgccgccagtgctttacgttcttccggagtagaagcgtttgcaatctgttctgacagtttatccagagtatcatcatctttctggacagtctgacggcctgtacgattgtacgcccagtgttcagaagacaggtcgatcacggtgtcggtttctgccaacagttcgagagcatcaaccaaagtaaacgcgttttcatcaggaaccatgttgtagtcaacaccatccatcagacgtttagccggatcaacaaccgcttcggagatcatatctttagcgttggaataatcctgtttggtaaagcagttatcgtatgctttaatcagacgcacatcacccagctttttcagaactttccatgccagatctggattcatggtatgaagcgcatgatacagaaccacatacagaacctgttcaccttctgctgttgccggatcgaagccgtcaacgtcattgatcgcgttttcacccagcgcccaaatgtttttgatatgttccggaaccagaacaacaccatttgcagcattcaggacatacacacggccttcatccaggtagatcgcatgagttgcatcgccaactttgacttcaacacgtgcggaggtttgcgcggtaatgatttcatcaaatgcaggtacatacgcatcaaacccttcaacgaatttgtgtaatgcgttggttgcttccgccattttttccagcagaggacggtttacataataaccatattccaggaaagcaatgttgttaaacgtcaacggcagagtagaacacgctttcaggatatcatcagtacgccagcagttatcataaccatcagtcaggaagatcagactgttcagattgccattatccgcttgcagatcggtagcgacttcaaccgccagttgcagaggttcaacgaagccagtacatccggtcggacgcagataacgatcgatagcatcattgattttgctcaggtcggatacagagctaaccttttcgcccacgaatacagaaccgaactgaccacggctggagaaatacagaatagatacggtatcatcctgcttaaccagcgttgccaggttgtttttcaggtgctgacgaatgcgcgggagttcgttatacatcgatccggatacgtcacaaacaaaaacgtggttagtcggggttggtttggctacggcgtttttgaattcaatgttagtgatcataattttctcatttataggtaaattttattaaaatttcgtttacttttttgctaatagtatctaatgcatcatcgcatccaaacttactactcaacaatgaaacaaaatcatccatcgttgttgtttgagactcgccaacgtcaaaagacagagcgtaggcaacaggatttttaatccttacgatttgaatagtatactcattcaggtcaaaccgttcaagatattttcgcaaagaaaataaatcaatcggtactggtagagtttgactaaacgttatttcttcccccagttgataggggggcatttttacacagatttcgtattccatcagtgatgactcttcatagtgtgttccagattacggaaaatttgcccgtgttcaagctgggattggaattctccgcattcatcagagtaagtaaattcataatcctgattgccaaatttagagttgtactcttcatacaaccacatcttgatcagagcgtctttctcttctgtttccagatcataccagtcacgcccatcataagcaagcgcaatttgaggattagaccgatatcgagtttcggcgctatcttcggtttcccattcataacgcttatcatcatagtatgattcgaagctatttcccatatgaccgcccaggtcgcggtgtacctgctgtacaacttcttccgctgtcgggcaagtcatccagctataaccacagttaggaacacagtcacccatcatttcgcggagattgttgatatcagtcggatccttcgggaaccgtacaataaagctacttgatgaactattgctcacaaaaccagaacggattttcattataatttctcccactcaaacgttgtgaaatgttttctttcgtcatacccaacagtacaacaatgtgttggctttcctgtgaatccatcaaacacagttatacaatagtaatgcaaagatggaagcggtgtatgcttaatgtagttgatcgcgacgttcaggtcaacagtagaacatacacaatcagacgtttgatcaaaacggccatcaaaaatcaactcaatgctatagatgttcatctttcacttccttcatatttttcataacttcttcaaaagttacggggatttcgttgtactgtagtgattcatcatcccatacatcgcgatgcccgaatgttgaactttttgcaatgagtttttcattttcccatacatcaatagtaacatgatcaccaagataagggaaattaggaactttgttcagcacatcaacacagttttgtaatgattcagaaacatgaacaatttcagtgaattcataatcagcactataagaagctacgtaaatcatcaccaccccctaacgatgctaatcaacagtaaacccaggatccagaacacagcaaccgcacaaatacgggccattactacatttccgcgactagtccactccgcactaaggaacaagagaacaaacgttaacgcgtataaaaccatttcaataacttcggtaatcatataaacctcactgaacataacgattgtagttgatgtgccacatgagactagacacaacatcggaaacaatcaaaaggaacaaaccagcaatcattatcaaaaggataactaaccaagtggttccgatattttgttttaacgacaatagcaaacacataatactgacaaaagcaaggaaagaaataacaagcatcacgattgaaggggccataatataaacctcacgaaaaagccccaaaaggggcttgattaatcaatgtccgaacacaccacgaatagactctgcgaatgcatacagttcaggatttttagcttttactgtttcgatttgctccagaatgtaatctggcttgtatttcgcaccgaaccagcagtaagagaaagagcgatcccacatgaacacgttatagtattcaccgttacgaacttcaaccatcacataaccaggattagaacccagcggataatctttcagaagattgaatttcgcgccagcaccagtacatccgttaaacaggtcattaaaagtcatggtatgttccttttgtcagtttcgtttcaacaaggtcactatactattcttcgttagcctatgcaagcgcttttttgatttgttttgcaattgcttcgatcaccggaacagatacagagttaccagcttgtttgtacgcctgtgttttgctcttatgcatcttgaatgaatccggaaatccttgcaaccggaaacactcgcgaggtgataacattcgagggttcttaccttcctgcaataccagacattgaacaccatccttatagtattgggctgttatcgtcccagtacacacagaatccaccataacggcctgataaccaaaccccttgccgtttgccttgtttcgttctttacgctctctaaagcccttccaggcacgatctgatatggtgtattgatcattatccggttcgagaatgtcaccgacccttgttggggtacgtggaggaacaggaaaactaaagaacactggatcgcgaaagcagacaataaacacacgctctcttcgttgaggcaatccaaaatcttttgtattcattacctgataatggatatcgtatccttcgtcctgtaacagcctgtagatggttttaaacgtgtttcccttgtcatgggttaatagctggggaacattctcaaagaacagcacagagggctttttagcccgtataatgcggagtatttcaaagatgatagtaccgcgaggatctaacatgccctgttttaaacctgctttactgaacgcctgacaaggaaacccagctaacaggatatcatgatcaggcacatcattttcatcaatggcgaatatatcaccctgaatattttcatcgccccagttatcagcatatgtttgttgtgcatgtttatcgatttcagacgttaaaaggcattcgaccccgccgaatgccttatcgaaaccgagcctcacgccaccaacaccagcgcaaaggtcaattattttcatacgtcgaaatcaacctcatcgattttgtatgattcttcgccaatatcagcccatagctgaatattcacactttttgcatcacgataaagagattgaccacaaagcccacctgtataacaagtttctgtaatctcgttaacttccaggcggaggctattgcgcataattttaacaacagccttttccattgccgaatctagggttttagtatcacccaatactacatctttaacgttcaaaataacatcactcattatcgccactccgtttcaattccgtgtttgtatgcgtcaacgcccagaggggtgatcactaaacacatatcagtatttttcgttggtgaactaaacgccattgatgcgtaacctttttgaatcagggaatcacgccctgatttactgggaacatcgttgaaatccaaatccaacatttttgacgagtatccgtaaagtttacacagaacatcaatttcagcgccggataatttcggatatgtcatttgtagtacctcacaacatgttcagaatacacacgttcaatgaaatcattccagaaatcgcgatcaacttctttcggataaccagatacagcagccagtttttcaacttcacacatcgttgattctagcgcctcttgtacggttgcgaaaggaacaccgccagctttaaccattttcaaaaatgcgctatccggaagaggatacacaatatcaccttctttgaaaatctgaatcaattgcataccaccgcgcaacgcatgagaaagagctttccagtcgatcccgttgttggcttctgcttgccgtgcgcgttccccgtattcatcccagagtttatacacggattttttcatttccgctacggtgatcgtagactggaatttacgccccagaacttcgtaaaattcctgacaacctgatttcagtgttttgtctgtaacgaatcgacaaaactcgttggtcgggaatcggttagaaatctcaccaactttgatgcgcttgccgtagttagattcatctacgttacccagcaatgatgtgccataccaggaatcaggaatcgtctgtaacacatcgacaacttcacgcagtgcagccaggcgagaacctttaacgccatacttcgccgcttgcttacgaacataaccaaacaggccagttagttccgtagtgtagaagcgtgaacggttagcgcggagatattgccagatatcagagttagcgatcagtttgctatcatctgcatgaagcatatcaatcgccacggtgtcaccatcacatgcgaggctaataaacttttgcagactgtaaatctgacgatctacgtcattaacaccgttctttgagtttttatcgccagttgatgtatcgatagacttcttcgcagtgcctaacaggatttcgcgaggatgagggagatagatccctttgtagtctttatcgcttgttggtgtttccagtccgtacaggtgagaaccgaatacggtttccataatcattttcatcagaattcaacctttaatgtttttgcgatcccgcgcaattcagcggtagtaatatccggaatgtttgttccgtagctattcccaaatacttttttaatcttatcacacaaatcgcggcgatacaccatttctttgtattcttcttcgctacgatacagttgataacccatccacccctcagcccacccggaattgcgcttgattttaatattagtacaacaatcagaccacaggtactgacgcgcaactttttgtacgtaaagggttttggggttgcgattttgtcgctggtcactacggatcccagcatcatacaacgtatcaccaactttcacatcacttaaatcaatcatttacgtctccaacaattagttttttcacagtagtgaacgggaacagacacgcccaacgtttctttactgcttctgttgtatgttatcacaatgaatcgattttcgccacccctaacacactccagatccaaaatctcgcgggttcccttagtgttcatgtctgcaacatagtattcttcgttgttgacaatcactatatccgacataatcaagcgaggtttcatgcagcatacacctctgattcatcaagccattccagattctgattgagtgattcaatcagctttttatcgcgtctggaaataacaacggtagaacctttttctgccttcgcgatgatatcaccagaagaagtgatgtattcaacctcataatcacggcgagggcttccgagtttatcaccagggactacattccgtttaacagattcatgggatttttcggtgaataccaattcattctctacatgggtaacaataccatcaacagcagaacgagaattaatataaattttgctaatttccgccatgaaaacactatctctcagatatcgagcagtcactttatctaaacactgagaagacactttatctccgccaggatataccgagataatcattacatgaccctgaacacgggcggttcctactttatgcagaatgtaaaccgttgaaccatcagaatctttagatatcaagatcacactgaatgattctttcttttccttccgagtttcaccacaggtaaaactcacatccagaaaatcaccaactttaacggcacggggttttgctacttgttcacgaacactaataacagggatcataatcatttcctcacagtttcaaattcttcatcagatttccaatatacgttaaaattacgacaatcatgatcggatgtcaacgtgtatttttcatttgttttttcgtcagtgataaccatagtttcattctcgatcgagttaacaccgtaaacgaaaacattctcaccacgtttgtttaaaaacgcatcacccttttcaatcaactgccaacaggtaacaggcaaaccacccggactaaccgggcgggtaacaagacaatagggatgtttaatcatttaaattcttccattgcataggaagtaagatctttgaaataccttgcggtgttgccttctgggttgtttgtaatctccatcaggataacagcactatcaactcctgctttcttagccatgaatgaaagggcttcggtagcaataatcgttgctttcataacatcagctttagaaacgttgattgtattcattttttcttccttttcattaatcacttggtatgtgtgtataatacaaaagccctcacgagaacgcaagggctttttattaaatttcgtataaatctggattcacaataaccgcacataaaagatcatctatatgtgcggcttcttgttctaaggtttgcttagatgaatgtgctttcaagcaacccccgtaaaggcgtttactatctggaaatgatcatcgaagaattccccttgtcgttgcacgacctcatgcataggtagccagaacgcgtctgctgcatcatcagcaccgcccatgatacgaggcaatgaaccatcgttattaggttcgagcttgatatactgtgctacagtcggttttgagaagtacaccgaacgtttcggatgatcgaacagcatcgaattacggatagaaccacgaataaccttttcaggtactttaattcgtacttcttccagcaattcacggatcgcgcaatcaaggaacgtttcattaccgtttttgtgtccacccggaagcgccaacgcatctttaccaggcgcaaacttacgacgaattactaacacgttgttattacatacgaccactgaatcagccgtgcaacagttcagagaatccggatacggatattttttgaacttgtcaatctctcgttgccagtgtgtatcttcatgggacaaacgttggaattcttttgtttgtgtccattcatcgataaaggaaaccgtagtgctaggcgcatattttaacaaatcttcgtcccagccttcatggtgttcccagataattttgcgtaaattggtcgaggacagatcctgatctccaaccttcacaggttcaaccggaatatgattccatccgaatgctttaagccagtaagaatctttgtctttttcgtacccgacgatcgcaattcgatcatttcgagtttcatcgattgccatacgaacacgggatttccatttttcctcgttatagaggtaatccggaatgtacgcgaatttgattctggctgcatcttcaacatcaagtttgcagatagaccagcgagtgatcattgcttgacgctgtttagcggtcaatgggtttaatgtgttcggatatgcataagcagaaccgatcagaatgtaaaccgtatcagcaacagcaagggcttcccttaccattttctcatgaccatagtgaaaaggttgaaaacgtccaattactacagctttatcatatttgtgtttcataacgtgctccacgtttaaaggttaatcataaaacagacgcaattatcaacacaccaaacaatccaccaacgaaaccaaagaatagtgaaatgagtatagtcagtacgatctgttttatgttcattatagtattctcgttttagatgtcaagcccccaaagagggggctttaaaacattatttacgagaatcgaaaatcactttaccagcataatccgaacccattacagtttgaggtacgccacctttatagcgggtagagtagttcatctgtacatccagttctttccagcggatcatttccggtgtaatggtgcgttgcagggcggcgttggcttctgcttctttcttcgctgcatacagacgggcatcagcatcacgttcgttagcgattgcagcgttttcacgcgcctgacgatctgcttccgcttgttttactgcttgtaatgaagtctgttctactttttgcagttcagctttagcagcgttaacctgttcttcgcggatcttcgtgttagttacctgttccatgataacttccggcagggtgatatcctgcaagaatacctgtttcacagtgtaaccgtaaggccgcgcataatcttctacttcctgctgaatcgcaatttgcagttggttttggatcttcgcatcaaacaggtcttgcgctttcggtacggatttaccaaattcgcgaacagtggaaagtagtttttcagttacatacttatccagtgcctgatcctgattacccgcgttgatacggttaatcggtgctttgctaccgtcgaattgcagcattacggtcatatccacagtggatttaaatttatcctgggatggaacctgtaatttgtcgaacttcatcgcgatgtctttggtgctgaacgtgtcgaacgttgccagcgggtttacaatgtggaaaccaggcagtacgggtttcggtgatactttacccatgaaggtttcagttttaaccgtaccgtcttgcacaatggtatacatgttaggcactaaccacagtgctgcaactacgcccagagcgatcagagaggttttcttcgggttgttcacgatagtgtttaagttcatcataatttccataagttgttgttcaattcgatagttattctatcatcacatttcacgctgtcaaactatttttaagaaagttttgtcagcttgtagattgtttgatagcacaagcccttaatctcgtccaggatgttcttcaaagaactatctactgattcgtagatctcgtttgcttcgttggctattttacggagatacgccaccgtgtcaagcacattttcggtttttagcacaggtttgtatcttcccgtgattcctatgtggatttcggtgaatttatcaaccaaatcctgcatatcttcgtaaaaaccctcatatgctttatgttgtgagtaggaacctgttgcaaaatgtgcgctatgcatatacgtaacggacataaggcacatgccaataaaggcatctatcttgcttgagttctcggattctgtaatttgtttaaatgattgcatgatgatccctttatgaacgatggatacttgcaaactcatacgcgaccctgattcctagctttgcgcattcggattcagatcggcattgtttttggtgccattttcgttccatgtagttgtagaatagttcgcttgtatttacgctgggagggatcgttgtgatgtatacttgaagggccgcattaatataatcgtcaaattctttctgaaccggacggtcggcggcgtgtgttgtgggtgtcatcatcaacaatccgaacagcacagccattgatatgcgtttaatgttcataacaattactcttttactcatagacccactataggtctactcctgtatatatttatagcaaaaacgaggccgaagcctcgttataatatttttgctgtaaagtcaatcaagtaatgtcataccaacacaaacttctttcgaaagcgcgtattttgttcacgttttctacgttttcatcccaaccgatcacaccagctttcatacgtttcagttcctgacgtaaacgggtacgtacttttgaatcaattttctttactgcaatagaaagcattgcattcagatcgccatgagctttgttaccgtcgcgacacagattattatcaaatcgaatgtatgcacatcctgatttgtgtttccagttggttgagtaccaacgcaacccatccggatcaatgccatgttgagcataataacgagaatactcttttacttcttcgatcttttcgttagatgaaaggtcacgaagaggattgtatttcttacggtaagtgcgactcataatgatctccttttgtttatgcttccactgtatcagggttgttctttagttgcaagtaatgttttcgacaaagtgaaacatatttgtcttcggccccgatctcaatctggtcgccattagcaacaaattttccatttgcatcaatacgggcaacggtagttgctttctttccacaatgacaaactccccgcaactccctgatctcatcagcaagtgccagcaacatataagaaccttcaaacaagttcaactgaaaatcggttcttagtccatatgtcattacgggtatatctaattcgtcaactacccgacacagatccatgacatttttcttggaaaggaattgtgcttcatcaacaaacacgcaagaaaccagattctcgctatcactgtaaaaatgattgttgtgaacatcataatacaagtccatatcaggcgtgatcatggtgcatgttgcttccaacccaatacgcgaagagatactctgtttaccttctcgcgtatcaattgctggtttgtacatcaggatccgcataccgcgttcctggtagttgtatgcatcagtgagtaaacgagcactctttccagcattcattgatgcataatgaaaatatagtttagccatttatcctctcaacaaaatctggggtattttggaatttcccttccccttcatggtttttgcatgttttatttgaacagtagatccaccaatcccactcatcataagggggtttggtaatgttcattacacaaattaaagggaaatgacaatcccgacagcgaacattttctataatgtttgcgttagccatgcgtataaccgcccatttcgctatcttgtgcttgatggatatcaagataccacatattgattttgcttttcagttcgcccatttctttatcaagcccactgtcaacaagacagagaatgtcaaccaccgttttacgctgggtgatgttgattttgttcgctttcatcgcttgcgccaatgcattacaggttttaaccagtgcggcgcgttgtcctttgattacggcgatccgtttgttcgctttcttaatctgccgccctgctttgataggatccatcatgattaattcaccttacgaggatcgaaatgaacgacaatgatcgggtaatcaccagtcacctcattaataatgcgcttaatgagttcccagtcgcccccagcgagtccagcaccgattaaaggtgtgatgataggctttccagtcttaacggcgtcagcaagccctacagcctgtttaaacgcattgccgattgcgtcataatcgacacgcggcccaggtgtccagaaatcatattgagtatatgcattgaaaacaatgttgcctttttcgccaatgtaaacagaacaagttccgagcttatcacgggaaccttttaacgtgttggcatcaacttgaaatgcaccaggaatacgatcgcggatttcgcgagcaataccagcacccatattgcaataacagttgcatccgtggatcaaatggccttcaccattcagatacatattcacagcattacctttcacttctttaatgatcatttttattattcctatataattcgcgttcgattagcatatcgatgaaatcagtaatatcatcaaaccaatccttagtttcttgagcatgagccaaatcaccatcatctaaaaacttttcgcgagcatcagcaaaattatctagtttgttatagagttttgctttgtctatatcattcataaattaaccttaattattaaaagaacgtaagaaaaatacgtaatgtcacacctgtttacctttccgttcacggcggcgatcttcttgatgacacatatataaaacaccaccaaaaattataaaaccgataacaacgcctataaagtatccagcactaaacatagtcatcatccccgcaatagtaacaaggcccagtactctcatgtttaccagcattgtacgccaagaacaccacaaccgccgccataataataaaaatccagatagccattagtaaagccctataccagcattgaattcatcaaccaaataagtgcggaacttttcacaccgttccttatttggcgcttgtttgcatagattcatcattggttcagactgcaaaaactctttttgtttcagcaacttaccgcgtttatacaggtgagcattttcctctccccacatataagcaacatctaactgttctgcgatcacttgcttacatactgcgacatctttgatatcacgattgttgcataactcatccaggcgagcatcacccgcgtgagcaaatccagcaaccagagttaaaagcagtgctaactttttcatgatgattccttattcatcctcttcgataggggtataataatgcgcattgcagatatacgcaagaacttttttcagagacatatcagagaatgtcggatcctgatttcgtctcatcccactaccagtttcaacagcccaacgtttgttagctggattgtatgtcagccagtagcaatcccattcagacagagtatgttcgaacagatcgaaacgcttacgcccatttgcttgcggccttacaaaaggttcaaccatttctaaagcggttaacactcgattaatgttcgaaccgtcttcatccatcgcaatccgcaaacagtattggttaatgtccggatccataccatcgatacccaggccgatagattcgaaaaattttgtcgccgcgtgataagacacactagaagaacgatattccaacatcacagggatcttttccccgtccttgacgttgttaatgatatcctgatcgataagttcaatcaggtctcttttctccttgatcaaggtagaaatttcttcttgcagcggggctatcttcgcatgaagttcttttatccgttgatcaattacggacacttcgaaagctaaatttctcattgcacccattccccgtttttgtcgatgtacatgatccaatcagcaaccgcccaatgggaagtattgcctttcggagtcgctacgatgtaggaaccagctttaaacagtacgcgtttagtttcgttcaggatcaggtcgctcataatgtattcctctcaattagatgcatccataataaaaaagcccccgaccgaagtcaagggctttttgtcaaatgatttgtttttcttctaacagcttcgcggttgtattaaccatacgagcataatcacgggcttctttctttgtatacttgaaaccagcgttatagctcgccagcgcctttttcaagtcgcctttgtggtaatcaagccagtactctagttcatagatcgcatactttgatccaccttgaagagtttcgagctttttgattactacgcgtttaggatatgacttatccattcgtgcgctggcgctccttgcggtaacttgccagcatccataagcgtgatggccctttttacctttaccgacattctcacatgcgcgagactcgatccaggcaatagccgctaaatgatagcctaaacgtttagccttatctttttctacaggttttgcagtcttcaaatcatagttgtgtccaactcgataagcatactccagaacctctttctgcttcggtgtgatgttatccaaatccttgatgtaggatggagaatttttgtttgccggaggcttcacagtagccttttgtaaaggcaattgatgagtaggcaaatccgcaatgaaatcccctagcggatccgttgcagcgttgccagaaaaagagcacaagaaaatgctggcagcaattataattttcttcattttaatacctatgttgcaaaaagaggggcaataatacaccccactttatatttatgcaactattttagatagtttttgcgtcacgtagtttatcggcgataaactcagcaatgttataatttgaaatagccttgttaggatcgtatagtgcaatgatttcatctaacgataccataacggcatgtttaaagtagacgctccagctagtagtaaggatctcgctgttgtcaaatccacaatcagggctgaacaaagcgcggtatttgtatccactgtatttcgtcagacgattcgtgctgtgcgcgtcactggtgatcagaaaagttccctggtgagtttccacaacgaaaaagtatccgaggcgttctttgttgtccagcatcttttcaaacttgcgatcggtttcttcgcgaacaatacgagaagtcagcatttccaacactttatcgtattcgggccaatcattctcgatcacgatcgcatcaaatggtttcttaccattaatcccgcgcccgatttcgattttcgtgcaaatttcgttgaacgttttcaaatcttctggcgtcagttctttaagatcgctcaattttgctacataataacgtttttctagtttcattttacggaaacctcaattcaaaaataatttcacagagttaccacatttaggacatgtgataaattttttcacaacataatcagcagcagagaaaaatccattgtaaatcgcttctctcttttgctgtatatcagatagttcatattctaacccacttttacagcaactgcaaacagtaattagttttgggttatggatgacagtaatcatatacacctcacaaaagggggctttcgcccccatcattagaaattgtcttcgacaaacgccgcgagacgggaacgatacactgtatcaagaatgatatggcttgagtgttcgtattctttcagcttttcaacagcccatacaaacccgttgtttacggcagtgtttcgagggttgtcgatctgcttaatgttcccgcatagtatcagaagtgtgttctctccgcaacgagaaatgatagatttaatttcgtggttgctaaggttttgacattcatcaacaatcagcacagaacctttgcccggatccggatgtccgatactgcgaccacggaagtaatacaggctagggaattgaaccacccctttttcaatcaaaccttcaatgtatttttcagattccggattatccttaaacagaatattcaggctagtaatacaaggttcaatagaaggccggagtttttcgcccaatgtaccaggaaggaagccgatttcacttgataacgggctatctgacttcacatacatcaagttagcgtaatgtccactattaaccaggtgcatagcaccggaaacagcaagcattgttttaccagaaccagcgccgcccataatggtagcaacatcgatttcattgctcataattgattcaacgaaagccgcttgcagagaatcacggggttggatagctttcatgagtttgcgtttcatagcctgttcatgcttaacaggtaagacattcaagcaaatctcatcagcagtcaccacacgcccgactaactcaccgtttgaggtaatgtactggttaggataaaaatcttcgtcaggaagcgaactgtaagtgatttgggctacattatccgtatatcccaacacttctacggtatcccagaaatcagggatctctacataaccggaatacaatacatcgctatcttttaacgtatcgtcgccagtatactgttctaccttacacccacgggacattgcgatcagcaacatcataatatcgcgagtaactaaggttgcatcctgttgcatacaagtttcaatgattcgttcgtcttgcttgtcaagagcaaacgttttgtttccgacataatcaaccactttaagggtgatagtgtcagacagtgctgggtttgtcaggtttaaaggaatacctgatttcgtaatcgcatcatatgactgaccgaaaataacttttgacagaagccggatcgccaatcgtgcttcgtgcgctgttcgttctttcgttttcaggtgatctaattcacccatagtagcagaggtaataatgatttctgtaccaggttgagtgaatgaatagattgaataggggttactaatcaaaacattggtgtctaatacgtattttgacatacattaaccttatgtggtttcgttaaaaaatgcaccgaaaacctcttttgctttccggttataaacggattttgcttcttctggagtgttatagtaccccaaaaattttctttttccatctatgtttatctgcgctttgtacttcccattggctttatgataagaaacacctttcaaccctgtactactgtttgagttacatttctttttcatcgcattttgctggttcgtcgctttctgtaaatttcttgctgtatctccattctcaacaccatatacatgatctacgataggaggaagataaccattctcaacgtaaaacactattcggtgtcgcaaatacatagaacctttaaaatgaatttgggaatactcgtttttgcttccggcttcacttccaggagacatagggccgcgctgaactttctaatacactttacctgtagatgtatcaacatctacaaaattcagaagagattcgatcccttgaatctcttcatgtatggttcttgatgaatagccatgacttttcattacatacccagcgaaattacgtgaatatatgctaatggatgtttcttttgtacacaatgcatgagtgtattatacacaatgtccatgcgttcattgtgtgtgagatcgcactcatcaaaaataaggtttattgcctggtgctctattcgacgtccacggaaatgattaagaattgcccctttactggtcaatacatcacatccggtagcaccatttagccgtttggcttcttctgctgcatttaacttatgcgctacgtaaatgttaagggaactatgggaacgtttcataaaatcaaacgcgcctttagtcttttgtgttcgtctacccagatccagcctggtttcgaataccataaaatcgttagggccgtaattatgcgttggttcttccaactctcgcataagatgcatcttacgacattcttcaattgtctttacataaaattcactattcatgttttacctttaaggggccaaagcccctttgttacgctaattccacatgcggggcatcaatgaattttgtttcgatcggaaggttcggatcatttttccagttgataccaaaacgcagtttaacacccagttcatcacctgcttgtttaacagcattcaggacaggcaaccacactttagggtttgtttgccagccttgaggcaacacgctaggatacagatccaccgcatcacccgtgatgtgttttgagttcattgtttgagatacacccttacggacgttctcgcgctgttgttctacagtacgcagaccttcacgtacaccaaaatcaacaggagacagttgcagagcacgttctacgactttcaccagttgaggtttaacgcctttaaggttgttaaggcttttttgactgaatttaaacataaaatcacctcttgtaaaaataccctgtttgggtacacagggtatttatggtttaagaggttcgataattaataatcgtaaagatcaccgaagcattcttcaaattcacgtttacgttcaatttgctcgtttctacgctctttcatatcaggaggaagacggttttcattgacttcatcaatgtaagcctgtgcatcctcttttgttagaaagaatgcatggaaattgtatccgttgtacccgttcatactacgatcttcaagagagaattctgtgtgacagtcccagtctttgtacagggtaatacatttagcaaacagcccaataccgcgatgaatgtatgggaatccagtaacaatcatcttgctacccatttccgcattttctccgttcacacagaatacttcatacatgatcgcacctggtttaacatctttcttaacagcacgtttttcaaaagcacttttcataatatattcctctcaattggtgtaactacagactactagtttattttctgaatgtcaacaaggtttatcgttttttgacggaaaagttagagtgaacaaacgatcatgaaggttgtcgatccgttcacaagcctgtttcagtatggttttatcaccatcatttgttgtttcaatgcatccaagttcatcggcgtcaatgttcactacgtcgctcatcaatgaagcaaacacgttagcatcaggatgtaacagttcttcgatttcggccttcatgccgtcgtgttcagaaaggatatcaataatatcacgggttaaatctccctggtacgggaaccctgtttctaaatgattgatgatcctttgtgctttcgtaatcataattttacctacaaaaaagcccctttcggggctagttaattaaagttcacagcaacggcacacaccgtattttgtaaatggagcatcaccgctaacgtaggcccagaaatcacatgcttcttcggcagtatcgaagattgcggcatcatagaacccgtgggcttcgttaccgttctcatcgatgaaaaccggagtccagatattaggattgaagcaatcgtcaacaacaacccaaccttctttagctttcattgcttctttgttggcttcgatgtgagctaagatttcgttcatgatgtccatttttctctcctaaagtgtgtttcgtttcgacagggctatagtctcataaccccgtatctacgtcaacacttatttgaagcgaattgtgctatttttgaaaaatagtccagagcacacagcaccttcaattttcacccctgtagggcttttagcaacgaaccctgttgcgtaggtgtctttctcatcacatgcgaaccaggcgtggcctgtgtacgtgatatcgctaaacccgttagcagtcagaatacgttcggcttctttctcatcggtgcatccggattgtgctaaaacgacaataacgacaataacgactaacaccaaagcaataatatatttcatgttaaactctttttaagttggttttactggcttcaatccagtacacgggatcagaatagttaccgcacatacccagtaacacagttgtacatcctaaatgatcggaaggtctcaatccatcaggatgaaaaggcaattcgttaacaccgatactggtagcaaaaagagcacctccagtactgtaaaatgttttgatatgatcgtatgcatcatcaggccactgaaaacgataagttttattgtcaatggttactgtatacatatcatattccgtaaacaacggatcttttccttgtgttgcaccatacagagcaccgcgccattcaaccagatttgcttcaatgtcgcttacacaaatttcgttacccatacgcaaatcatgaaggatctcttcaatggtacgaatagccccgctaagttcattagttaacatagagtttcctttaaattggtttaatggttttcaggtgtagtttagcataagaagaaccaaatgagttgccattatgatcaaacttatgttcttcactcttccagtatttccctgatttcatcaagggtatacgcttcttacctgctgttatcgtttcaaccattccggtatgagtgaatatcatgatataccctcttctttcagcacttcccagatcaggcgatccaggtgcatcagattccacataacggagtcatacgaacccagcgagcgggagtaaatcactccccatgaacgataagccttttggaatgattcagcactattttcatcgtgcggcatatcgtcaccagaagcgatcaacagtttcagaaccatcaggctattgagcgcctttggcgtgaattcttgttcgcttaacttcatcgcgtagcgttcgatgatcgcgattgacttcggatctttaatacgcccatctgtacggcgcgttttaaacgcgctcattaattcatcgactacggcggtacacttcatatgcttcatccttttcctgtacagacatccgattatagcggatctcttcgcgctgttcaacttctctcactgcttcggctttcttttcagcggtgagtatgtgatgtactacagcgtttcggatttcccagagatattcaatcatctgcatatcttcaacggtgtggtagcctttcatatcacattcaaatacaatttcatcgcgttctgccattgccacctgtgcggtagaaggacaaataaccattccagagtatttttcaatcaacgattccagtgtacgcggttttgctggaatgtcaatagataccggaaccattcgcatcgttgaatcattatgggattggtaaatcatcagaatgtgatctccgcaaactgcattctacgctcaatcgcatggatagcgttatcacgctgttctttgttttcatatccagcccaggtaatcggggttgaacagatcaggtgaaaagtgattgctgggtgtctcttcccttcaacaacgattgttgcatcatcttcgatccaggttacgtgatccagattcaccggatagtttcttacggtagctgtttcgccaaccaaaggcgacacgtccagaatatcacgatcgcggacatatgatttaatacgagatacgattaacattatttcaactccactgcatatacatcggtttcaggggctttgtgtacgcgcatatctttaccacataccgcataagccggacagttacggcaaccgttatgatccttgttgcccgtcagttctttacggaactgttttgttttcgggtgttcccagatatccttcacaaaatcttcggcttccagaacatccagaccttcttcccagccaccttcaacccagcgttcggtaaacgagcaagggaagaactgaccacgttcgttgatgtaagagctaaacatcgtcgcttcacagtcttcggcgtattgcttgtactgttcgaagttcgggtgtccctccatcgcttcaacgaaagcgggggctgaacagctatcgaatccaaatcctacaccagaatcgaggcaatattcaacaagttttttatactgttcgcgggtaacggtgtcccagttcttaccgcgtcccttttgtttcagacccaggaatacgatcgcgttaacttgtttcaagcgcggatcattctttacagcatcaaccacgttaaacgcgtcatcataggttttagagctaaccatgaaatgaaggttgatttgctgttgtccggcttctgcaagattagccactgaattaaacgctacatcgaatccagcatgtttgtatactgataccgcaacagccccagcaacagccgctaaacgcgctgcaacgtcttttgatacatcagcaatggtaaggtttggtacaatgcctttagaacgcgcataggccatcatatcaaacatatcagggtttgtttgtccctgtgcatcagcaccgagggcgcattgtgttaaccagggcattttatcaatgatagatttgaatgtatcaagatccatattgaaaccgttagggttattagacttgtagcagaaaccgcaaagtttaccagcagggccattgcatttagttgtgatctcgatatcgagaatttcggggaatggtgcgtattctggatcgtgggaatatgttgcaccccagcgagcgaattcacctgtatcaacgttgaaattatagttgtagaacttcgagcgagcgaagcgcatattaccgtgttgatatatgaacagggacggcgctttgatgctggtaacgatatcgacagatttcataatataattctcaaaatttaacgtgggattggaagacagcgcgagcaaggctttcattgtcgaacggtatcgactggtgttgcgctttgctgtcaatgttaacgcgccagaactcactagaaccgtttttcgtggagtaatgcatcagcgttaccgttttattcttttccaggaaggtgcgtttgtcaatctctgttttgatttcgtgttgcatcattttacactccgtttcagtttacgttcgtcagccagttcttttttgtacagtttaatgtacttcccgttaagggtgcgaagctgttggaaaaccttgttgcacaaagcacgtttcgctttgtattccggcgtattacggattgattcgaccgtcatacccatttcgtttttagggtacgcgctcaactccctgccgatctctctgtgccagttgcttaactgatcacgctgtgctttgtactcttcaaaagttaacataacaatctccggtttcgtttctatgtgtgtaaggtatcattaccctacacacaacgcaagcgattttattttccgtaaagaacacaatattctttatatttttcacgggctttttcttcattactaaaggaaactcccgttccaaaatcagaaccttcgaacgtaacatcccacgattcatacccatcttccgaataataggaaagtgttattttacgatcttcaagaacaagttgttcaacaacaatatcaatttcagtagtcatagttcatttccataatcttttgctgcatcttcgggggttgcattcagtctgtaaagctcaacagctaacggactgggttttatttcgcggttcaggatctcactgataccgcgaaggaattctatataaggacggaatctcatttgatacgtaccgcgttaaaagcctggttgcgcagttcataagcctgttcaagctgttcagtagtgaacagaggactatcagtgttagtggtgaaactgcaaatggttttgttgtcggcgttgacttcttcgacaacgatttcataaccccagatcccgctatactcacatttcacgttccggtacttgatgtaaaccgcagcaacatcttcttttttgtagttccggcttttgtagatgatttccatgatttcctccttcgtttcgatgtgtgtacaataacagatcagggttatcgagttttagcaatttgtgctaattatgccattttcttagcgattttccaggaggctttgaacgccggaacgtcttcaatatcaatccagaaaccagatccgaaaccatcactatagcaagggcaaccgtcgcagtagttttcccaggtcatcacttcaccaccaacagaagcaccagtttccatagcacgtaatgcatcttcaactttttccaggttttcggcgttgtcgtcgtaaatgacaaagtaccatttaccgttgtattcgttacccagtttgattgattcgcgaacaagtttcatgatgatttcctttttgtctgtttcgtttctatgtgtgtaatataacaaaaaccctcaccataggcaaggggtttttttgcaaaaattatcgtttgattggggtattatctataacccgttgaatttccgaacgtatcgtagaatactgacacaattcggtaagcgcccgatcccatctacctgactatatttctggaatatgtaaggatctgcacctcgatagccagttgcttgatgcttacactctcgtttgaaccatgacattaataatatccttgtacgttgaagcgatcacataacaattttcttgtttggttagtatcgctttggatagaatgcaacatagcgctgatcatgtttaggttattttgcatcatttccgcgctcatgagaacttccatacgcgcacgtaagcgtttattttcttcttccaactcaaccatacggtcatatgctttgatgcgctctaagggcatatcaggacgctctttgagtacgcgagcacgttcaacctcacaagcatgatttgctttccagtggttcgattccgcttcaaatttattaaggcggcggatctcttcaaccagctttttgatcatgtgtggatccatcatgtcgatgaatttcatcaagcaattggattttgtttggttgtcagcaacagaccaagacgaattatacgtaaccgtaaacgtgcggcccatttcatcaacaaccccgatcttgttatcatcggtgattgtagccgcccatttatcccgcatggctgtacaggttccactggcgacactatgcaacttgtttaatgttgcgtcatcaaacacaatttcatcactcatgtatgcctcacatagatttcaaaatacgcagaagtgcgttagtaaagatatcaggaacacaaccaccaaacaacttatgattcatcagcgctaatttcatgctgtgattttcagtatatcgcccgttatggatcccccaggcaacgacattaccaggttcatgaataactaagttagtgagagtaacggtcatgcgctctttatcattgatagagaatgaatagcagtaaccggatccgatgtcgccgtaaaggttaaggtctttcaatttcccttgctcatgcaagcgtttcatatgaactgcacatgcatgattaatagtcatttcgtcatccctagcccagtcatcaataccagaggtataacgaatattgaaatagttagtcagttcatttgatacgctcattagaaacctcacttttataaaattctttaccagacccattacagctactgcatttgggggaacggttgctatcataccgccccgatccgttacatgcaacacatttccttaatttccagccatacacgaaccgcatataataatcagttcgtgcggccttgcgttcgtggaaattcatgctttgtaaacctgaaccaaccacatttcgatgttaggcgcgtaagtaacgtttaccttatgcatagtgcggtatttgtaagcggctttgtatgcatcgagttcagtcggaacacagaaagagaaaccgttgtcatagcgttctgcgttagaaacttcacaaccaactacagcggcaatatttttgttcatgttcatggtgttttcctttctctgtttcgtttcgatgtgtgtaatataacaaagcccctgcacgaatgcaagggctttttgattattttggtagtttttcgatggttgcttttaactcattgattttattaaagagttcatcgctatatttcatcaactcactacggcgcttttcggcccacttgaccaggaattcaggagaatctacaccatacgtgtaaccttctgcactcagttgaatacgagcacgggaaccataatcaacagaactttgttcaatgagaaacttaaccgcatcaagcagggctaaatcttcatgacttaccaatattccttctgcctttggaagatccacaacttcatcctggatgagttcacggcgggttgtttcttccagtgtttcatgattctggatcatcgtttcgaccggatcctttgccacgactggtttgttttcacctacttcttccaaaaacatcaacatccatccaggaattttagtccggaaagaactttgcacttcactggtgcatgaatttcccagaatgtggatcgcgttgccatgcatatcaactttattgatatagataacgttctgctgttcctgtcggttgctaccataagaaaggaagcggcgtaacgatgtgttatgaccgtacttccctaaatcaattcagccaggcaatcaatgatcccacggttagaaaccttgtagcgcttaccctgtttgaaaaataacggttcttccaggtgagtaggggtaaactcttcataaagaacatagaattctttaggaattttgcgctgaaccagactcagtttacaattattagaaggaacgataacagagtgaatgtttccttctgtatcacacatagcttgcattacttgcggatagtaaagatggttcttgcaagtatagctatggatacgactctgacgttttttgaagtaccatttaccagtttcaaaaggcgctgttgtaaaattcattttgcattctcatacatagttaaaattgcttgcatatgttccggtgattgtggaacccctgcaaagttcactttcaaaaagaaattcaaccgatcttttatgttgcactcatcgagtccaagcgctggcaatgaaatgttttcaaaagcacgttgttcatgtctttccatttcaccccaaaacaaacgggaaccgttaggcatcggtattccaatttcattgttccagaatttcatgatagttgtcaagcgttgttttccatcaatgacttctacccatcgagattcgttgaattcactatcaaccgcgatcgcaatgataccgcaaggaaacccagtaatcaaagtcttcatgaaagcatcttgctctttctgcttccacacgtagggccgttgataggacggattcagatccagatcgttgttcttgaaccagtgaatgtaactaccaaccatgatcgcatgatcgcgactttggaaagtttttaactcacgaatacggtttcttacaatttcgtctgtcattataaaatcaccatccagtatataatcgtaatcataaccgctacagtgaaacacattgcagcatacacacgcgcattatgaacctgtgttttcaattctgcgatctcttgatccttttcgctttcaaactcttcgcgagtaccataatacccaggatcgttagccgttgccaatctaaccgcatctttttcaaccagcgttgcgtaaccgctttttatttgtgtcgccccgtaccatccaccccgatcgttgttaatgatcagatgatcacctttttcgttatgctttgattcgccaacaacaataacccgcttaccattcataatatgatcctcaaaggggccgaagcccctatttcgcgttcttctgtagataatctaacagatttccgctttgatgtaaatccaaaactttagaaaacttctctgcgtttctttcgtttgtaagttcgtcgaaatgccatacaccatcatcagctattaacgcgccaggtgatgaacctgtttctacatcacgggaaagcgcaagccccagagggtgtaagatttcgcggttaatgcgccaaacaaggcccatttcagatagagtattaaaatcgacgtatttcatattatgcctttggtttcacaccgtaggccaacataccgaaacggtgatcattatctgcatctttaaacagaacttcgttaccatcaatgcagatgacctttgcttccggatcgatgtatggaagcaaccacaaagggatcaggcgtaggccgctatgttcatcccaacgactgaaattgagttcttccagttcatcaagggaaagctcattaggatcgatataacggaaccatttggtatttttgaggcggtcggggaagtttacaatttcttcatagccgaattcagcactccatgaagagtaaacagtgacttcggatgctttggttaaaacagcatcgcgaattgatttgcagatatcgattaaagtcagttgattttccatgatatatttctcatcttgctaaaattttaggcagtagttgccccatcgttttacgtgcatgtgacggaatctgtgagatcgggacatatttaaaatcatccatttcacgtatagtccgtccgttcttaacgaaagttgatgcacaatagcattcttccgctactgggtaatcttgccctacatagaggaataaagcaaggttttttgttttcgtgtaatcgagaacacccaggctaaccaattcctccgcgaacacttcaaatcctgtttcttcgaagcattcgcggatcgccgcgtcaatatgagtttcgcccttttcaacatgccccttcggaatatcccaatggggcgtttcggtggcatggcccatcaacacggcaccatctttaacaaagataatacccgctgatagttccatttattcacccgcaaaagcgttatcaaatgcttcaagtgcgttgttagcgcgagcactggcttttgtcacaccagcctggagattttcaaagaaggtatgtttccacacttcgcggcgactggattcatgttccagactgtttttgtgatcaccgcgaatctgttcttccatgtcataacggtacagatcgagttctgcgtttaatttctgttctaatgtctgtgcaaatacatgttcaatattcattttgtatagcctatttcagatttaaggttttcgagggtggagtgataaacaacattcccttcgtgtcgagtataccatacttttccgttctggttacactcattcattactttttcatctaaaccagggatcggcttcatgctgggagaaaacgcgatagacatcatttgttctgcactatcagcaaaccaacaagggaaaacagatccagttggtttatcaagatacatcaactctactttagccatagatttcttcgaaatcctcacaatcaggcaaatacgtttcacagaaggtgcaaagcgtaaagaatgcaggttgacgaataccaggattatccggtagatacatccagaaggtgttagcaaacacgatgaatgttttcaggttttcaacggttacttcgctgataccatcataaccggattgagcaatagcgcgttccaggggaacagggtattgctggcaatagtcggcgtaatgttcactcaataccattgagttagccgcttttacgagatcgataattttcattcgatataaccccaacgaatttgtacgttatcgatcgatgcctggcttgtaggagttggatacggataactttgtgcttcccacagataaacaacagcgtgttttgtcaattcttcgataacttcatcgaaagtcccgacacaggtttgtaaaggcaacgcgaaaggtttatcactggtttcgacttgagcaatcggcccatctaccaggatgacgcgaaccgttgtatgctcaatcatatgagcgtatattttgtttttcatgattttacatattccactttaacaggtttggcgataaggtgatcttttgtgaagccttgtccgtcgcaaacatcacaaacgattttgaaatcttccatttggtcgacccatccagaatcaggcaatccagaagggtacgtgttgaaggttttaacactgtatcctttcccatcacacttagggcatttatatgggtatttcgatttgatcgcactatacaattgacccagtgtggtcgaatgatcaaagtgtataacaaatgcttcaatgtcagcaatacgcagttcgtttggcttgatcacagtaaacacatttgaaggtatgtttgagcgcataatatatttctcacttaaagaattttttgatgaaagagaggaacaggccaccgctaaacatgatccagtatccagcaccgtcgccatgaaacaggacgtaaaccgcaacaccgtagcaaaagagttctgcaatgttcagtaagtttctcataatcccctcccttttctctataccaggtattttaccagaatatagaccatagtcaacaacaaagttttatcaacgatacgatcaccagtcatcagtagtcacccataggttgagaagaagcaacgctcaatacgcggaaagtgcaattgttccattcacaataagtttttgcgcaatgaacacttcctttcataacaaacccgtttgagaaaattaaccagtaaagtttcatgatagcctcctttgtttcgacaaggccaatataacaaagcccctgcacgaatgcaagggcttttttcagtttttcaacatccaaagttgcggaggacaatctttagaagcgattagacgatccaggcgggacataacccgacgataaccgtcgtattcaaaattaatttttggtggaacgtagttgacctggattgtttttctgttagctaaagaaacatactcagggatcaccgttcgcaaccgtatagcgatcactggcttctcttcgccttcgttaaagaacatttgaacagttataggacaagcaaagattttaccatttacccgacgataaacaataacttcctgtgtcccttctgttttggccttcaccgcgtaggttagaacataacacgaataatgatttgctagactcatcatgatatcgcgataagtttcaatatcttttttaatcgatactgaacggtctttaaagcgatctgcaatgtggtcagcagtagccgctaccttgattgtataccagtcacctaacgcgctagtaaacgcctcgctaacttcttttcgtacactgttaacaagatacattaaacgtgttctgttcatataatcctcactgatttttgaagtattcgatctgacgcaaacgcttttcagcggcggctttcgaatcgtattcaccaagttcttttgtgcgatcgtgattcaaaacaacccacttatcgccacgctgttcaatgtgttctgtaatatcttttaacgacttatccagatccagtgattcagcctcttcacagataatagtcaaatccacgggcagtgtcaacaaccttttcactccgctgatatcatcaagcatcgaatcgtatgcaagggttacgtgcggtttgtaatccggataatcgtatgttgcgccagcatcaatagaatctttgaaacggctatgcaggtattcagattccaggatccctacgatagtgctaccgtattttgtgtcccacttttcaacatcaaccagtttagcaggttctgtgatgtcctgttgcgggaacaaatcaaccgttttccggctgtatacgatcgttgtatgcatcttttcggctgaaacagcattctttgtgatacctaatgtcttttgaacatttttcaaagcctcacatgaagcctgatcgaatttagcacacatgtagataccaggatctacaacaggttttgtgatttcaagaaatgatttcataaaacaccccaataaaaaaggggccgaagcccctttgtaataaatttgtttttacgcttcttcgccaaaggcggcttcatcttccgcgcctttttcgacttcaacggaagggatcagagcggataccgcgccaatcactgcttctggggttactggctggcttgcgtcaatacccagtaccgaacacaggtcggacagaagttgacgatgaaccgacagttcactttctttttgcgcgataacttcgttaagatcgaatgcgcggcctttcagtaccagtacttcattttgcagtttttgaatatcagacattttattacccattgttaaaatttaaaagtatcgagcactttgctctttagttgtttcaaagtaccttcgttagtgatgatactatctccaggttgaggtgtcaaacctttttccgtggaatgttcatcaacaattccggtatcctttacaataaacacaaacttagcacccaagcgtttcaggtatttatattcgtgttcctgacgacagtcagttaccagaagatgattgtattcgtcaccagcatatttattgacgaatctttccagtgtgtaacgaacccaaaccgtgttatcatacttgcatacgatatcagttccaaacacttgcatcaagcgtctgatactccagggagtatcgttactcataatcagattatcaatatcatcaggactataaacaatattgtatccacgttctttgaggatttcaagcccgattttgaaaatatttagaacatcttcattagacatcacaagaggtttctctcgatcaccttcgtaaaaaatagcatccggatcagaatattttccttcaaccagactacgaatgtatggtttagcgtaaccatatcgctgcattgctactcttagcgttcttttgataccaaatgccagtgcttcacactgaacatcattgtacgcctcttgaataaatttagcaaccgtatctttaccagttcgcttttttccactaatcacataaatcattagctcattctcttttgagaagtgactacttttccgtcaatttcaacttccatatgaaggaagccaaaagttgccatacacgtaaccgcttcatcactatcgttagtataacccaattcaacctcacccaagtttgttgggaaggcaccataaaatctaaatgtggcgatcgttttcatctgggagttatccaggatatgcacagcgaatgattgcttaggatcatcccacgcaacagagttaaactcgttgtaatcgtttgtgctcaacatccatatgtaaatcccaagatacgatctcatttcctcatcgactacaaagcggatcatcaaaggatcaaactcaaaagccgaaccaggtactttacctcgaaccatcatatttgcaggaatatcaactgctgggaggttcattgatggtagtgtaaccccttgaacttgtaaagtcaaacctttcatgtaactgttatcaggaatatcaacccgaaagtttgtaggtgagatttggtttaaaatcatttctgtagacataggatctcctttcctctatttagcggggaacgggatcaaagcggcctgacggggtaatataaaaatttgaagaaaatgcttgaccttttaaaatctttgatctataataattattaattaaaattttatcaaaaagatctaacaagatcaagtaaagtttaataaataatttatcaaaaatttttagatctgatcttgaattcataaattttatgatctataatatattaatattttattttatcataaatttttatgaagatcaatacttagatctaataaattttatgctttttctgaaaacttttcctttaccccgtcactaaatactggtactatgttcccatattggaaatcaggaaaaacaaaatgactcacttgaaaaaattcaaagaatttctgaccgaaggtaaaaccctcgctcgtaccgtagcacgtggtcaacgcgctaaaacttccgataaacattcaatcggttttcttcacttcaaacatggttctgatttcgaagttttagcaccggattctcacgatctggcatacttcggtaaaaacattgtacgtttgaaaggtatgactactggtaaagttcaagcggcttatgtcgattgggctaaaggtactgtttctttctacagtggcaatccggatgatgatctggatttcgacaaaccagaaaaattcaaagctgctactctgtatgaagaggcggaagaaaatctggatctgtataaccagttagcagaagatttcgaaatcgagatccctatggatgaagctctggtgaaaggtaaagtttacaaactcccaagcaacgatatgcgtcttctgtacactgggcgttctaaaactaaagcaagcggtgaatatgcagtgtttaccgtagttgatgcttccggcaaacctcgcctagtatctggtaaaaaattcacccaggaatataaaggcgatatggtttctaaactagtcctggctgaatccgaagatctgaatgaagcggctaaaggcattcgcgaaaaagttattgctgtgatggtgaaacgcgggtttaacgaaaaagatgcagaaaagatggttgacaaaaacctgaaagatgctatgaaagttagacctggtgcgacccctggcaaacttgcagaaatagttagcaccctgtaaaaataaagccccttcctttcggttggggctttttgattagtatttgctccagacttttttcgcgccgtaaggtttccctttggacataaattgctgagtcggtagccaaacagctttcgcccaatctttaggggcaatctctgctaatggtgatttgaggtgtgatggtagatatgctttgatcatttctgttgcgcctcgcatacctttcacgttaccccagttaattttaagcactgtcttgttagagaggcgtttagtggatccgtaccctcgcttcaataactcttctaaaaactcctgtcgtgctctgggtggcgcatagtgcaagttcaaaccatagaacactaagttacccgctttcgatcttccggatcctaagaaaatgatcagtggaaatctatcccaatacggcagggtgtctttatattttgcatcatatgcaaacgtgtacaggcgacccgttgctggttttgccacacggtgtgttttgatactggttttgatgaaattaccaaaccattctgttgaatctttctgtcgctttgccgccgatacaccaacagtgatctttttcagactattacggaaatcgttgatgatctcgattccgtgttttttacggtagtcattacgttttttacgggcttctgtctctgcggaacgtcgttcaatctcatcatcaatctgttttttgtaacgatgcattgactttgtgaacgttgcgtagtttaatccctcagaatcggcaaaacgtttagcagaaacacctttcgtttttgccttacggaatttgatccccagttcaacccaatcactcaatttgcgtttgggtggtgctttgggtttatcctcttccgcgatgatctcaaactcaaaaataaaactcatgtttccctccagggattactgacctcgccacccaaaaacttttttgagtgattcttctgttacgattttgaactgccagcctttttgacggcatagctcatttgcggctttccacttatcaatattaactgtataggtgtaaagagcatcaataaatttctttttattgtgtacgttgttgtttactggcttcggtggaggcatggtttctttaaggggcttaacctcccaaagatatgtagtaccattttccatttccacatagaaatccatgtaatagcgtcttctcttaccgtctgcattgcagaaatacgggatcactatacattcagaattccaacgttttacgtgtgggtttttatccagccacttcataacgtagcgctcccacgatgacctatacgtaatctttcgcggatcgcctttatacttctgtatgttttcgggtacaaacgaccctttatacgtctgtcttccagccattgcgtaaatcctaaatagaataatataacgtttagataggggaacttatcgtgctattttcatacttcccgcctgttgattacaaaggcacccagacaactgatattttccgagactatcgattttattttaatcgtgtgattggaaaatataaaacccgtagttaccagataacaggcacactacgacctgaacaacttgcagaatcattatatggaaaccagcaatactactggatcctgttgatgcttaactctgtttatgaccctttctatggttggatctccgatcaggaagccgcgtatcagtgcgctatacagcgttattctgaggttggcggtgaacaggttctgtatcatgtagatgaaaacaacaacaagtattataaccttgtcgaagaccccaataaccctggtcattggtatgacaaaggtgacaaaccaatgctgtatttacagtatcaaggtgtattagctcctgtagatatttatgaagatgcagtgttgcaaaatgaagcaaaacgaacaataaaaatcattagtccgtctgacatccaggcgtttctgaatgattttattaaagaaatggaaaaggctaactcatgaaattaggcggaaatttacactcccctttctttgatggggtggttgaaaacgttgatgatccgcgcgggttgggccgtgttcaagtccgtgtatttggacaacacccagcccaaaaacaaaaatccgatgcaatcggtgttcctgttgaagatttaccctggatgatgcctattcaggatattagaagcgctgcgatctctggtgtgggcttctctccaactggtatcactcgcggatcctttgttgttggttattggcgtgacaaatggcaccaagatggtatgataattggtactgtcgctggtgaatatgtcgaacaaccagacacacagaaaggtttttgcgatcctatgggtgaataccctcgctatgttggtaacgatgttaactcccttgcattaggtggtttgaaaggcaaaggatcatcaagtgtcatcattcgtgattcaaacacaagcatagcagtaaacccagacgatcgcccactggatgagataccagaagataaccgccctgatacgggtggatttacgatcgaaaagatgctcaagcaggatgaggggatccgtacacgatggtatacagacagtgaaggatatccgacaattgggatcgggcatttgcttatccgcgaaaagactcgcgacactgcaaaaattaacgctgcgatcagtaaagcggtaggtcgagaagtaacaaacgggacaatcacggcagaagaggtttcaaccttatttgctcaagatttagccaaagtaagatctgatattcagagaaccgctaacgtccgtgaagtgtatgtgaacctaaaccgtcctcgtcaaatggcgatcgaaaacatgtcgtttcaaatgggcgtcggtggtgttgctaaattcaccaataccctaaaagcgatgaaaaatgaagattggcaagcggcttataatggtcttcgcaattcactgtgggctagtcaaactccaggccgttcttctcgcgtgtctaaaatcgtcctcacgggcaaccttgaatcatatggggtgcaagtaccagatccggaagggcgctctctgagtgctgcttacgctgcgtataacggtgctacattgtcggctactagtccggaagatccgtttactcctggtgatacccgtgtgatgtttgaagaaccagcatcatcttataatgcggaatatccgtataacatggtgtttgaatcgagatccggacacattcaggaattcgatgataccccaggatacgaacgatataaccgtgttcacccagcagggagttacgaagaaattcgcccggatggaacccgcgttgttaaaatcgtaggggatgattatcaaattgtgatgcagggccggaaactcaatgttaaaggcaacttgcaggtagttattgaaggcgacgcattcatttacaacatgggtaacgttcaacaaacggttgatggtaacgtaactgagtttgttcgtggcaacgttcaacaaactgttgaaggtgagtacgttggcctgattaaaggtaacgctgaactaactgtaaacaaagatgcaacagttaacgttgatcagaatcttaccgcaaatgtgaaacagaatgcaaccgtagctgtaacagaagacgcaacgatcactgcaaaaaatgcgaaaatggagattgaagaaacgatggatatcggtgctaaagatatcaatatcaaagcaacgaataacacgtttattgattctggcgcattaacaaaaatcactggcggcaccgtccaagtggggtaattaaatgattatggattatgaatcaataattgatggaattatgcaaaattatcagcatccttgtgatgctgagatccccgctggctattatcggcgggttatctggcaagggcatacagaaaattatccggctgttggggttgagtgggataccgagataatcaaaatcggtactcatctttatactcaagaaccattcggacatagaagcacggatctacctgttgtcaattcaccaggaacagatccaaataccggacaatcaacagggatccttgttccaaagattggctattatttcaacactcaagcagaaattgatgcttacattacatctattggtgcaactaaaatcaatggtggtaatgattggtatggcgcggatctgtcaaaatcaaacctatacaaaaaccctggcgaactggctatgtataaggttgaaaacagtggcgggtatctttccggaacaaaccctgtatgtgatgctcgcatacgtcaggcatataatcaggacactggcgcattcaccaatattgattattattggaatggtaatcgtatagcctatatgaagcatgacgaaacaggggcgcaccagtgcaaatatacgggtatgcaggttaacaccaacgcagatacaagcattcctcctgttcctcctgcaatgccttccacttatggggcattaccgagtgaattaagccgtgctgatatttcgtgcattccggcaactgttggtttcgcatatacaaatatcagtgatgctatgttacaggcatggaacgaaacccgtaatacgttcaagctacagtttaacatgttaacgggtgctgtacagaatggattcgggatcgcgacgatgtttgatggtttatccgtatcgatggaagaagtaatggcgggggcgctcgcattgtcacagcaagcatggcaaactgctatgaaagttttcagacaagtgattagcgctgcatttaacattatcggtggtgcgtggggattgattaatcagttcttgcctcaagtaaccatcttaggtgttgcgatcaacatttacgatctggtgtttggtgataattctgttcagactttgaaagatgcatttaatgcaatcatcaaatccggacaacaaacatatgaaaccgtcataaacgcaatatacggggccataggaagcgcatacaattactctgtggaatatgtcaaagctggcgctcgcgaccttgtggatgcgtgtagcgcgttatttgattggtgtttaacgatgttccaaaacggttgcgttgcattaatcgacttatacggtcggatcatgcaaacatgggctatccctccggaagtcccaaacccgttatggtctgcggtgctggctatccgtaacatcatgatgcaaatcaaaccacttgatataattctgggcggtaacttccctggattcactgcaatggatttgtatcaacaagcacaggaaaaagtcaaggcttttgttgatgagtcatacgaacagatccgagggctttatgaacaagggcaggaactttacaaaacgttaaaaaatcagattttcgaacgtgatgcaattcagagaaaattcaaccagtacttaaactggatgtggggcgctgtaacagacgaagcaacagcggcttatcaatctgcattggatgttgcaaacgctgctgtagctgcaacacaggccgcgtatgacgctatacaggaacagattggatctctacaagatgcaatgaaagatacatacagcatggcgatggaagaattaaagaaattgcctttgatgagtacaataaacgagtttttaggcttctgtggtgtcgcatttgacgatcttctcaagtcatatgaaaatgcgattactggtgctcagtctctgtacaaaaatttcattgatagttctcgctcgtttaaagatcactgcaaagtaatctataaccaaatttgtacgttggcgttgagtaaagtcacacaatatgtgaataaattgctgtctctcataggattagcaatcaactttggttcgattagtgtatgtgttccagtactgaaatactaaatagtcgaatgatcaagaggaatttataataatggctactgctaagactaagactgtcaaaaaacagattaaccaaatccccgatatctttatcgggggtactttcgaagaaattaaaacagatctgattgattggctgggtggacaagaagagtttaaggattacgatttttccggctcgcgaatgaacgtactgatcgaccttctgtcgtatgctactctttatattcagcagatgggtaacacggctctatttgaatcgtttattcgcacggctgcgttgcgtagttctgttgtacagtctgctcaagaactgggatatatgccagattcgcgcacggctgcaagcacagcagtaatgattacggctgctaacccactgaccccaacatcgatccgtatcccgcgcggtacaaaattcatcggtactgtaaagaatacagacagttattcttttgttgtatcggatgacgttgttatcgttcgtgatagtaataacaactatacatcaatgctgaacctggtgcaaggccgtttagttcgtactgaactaatttatgacggttcaagtatcctgatccgagatccaaacattgaccgtagtcaggtacgtttaactgtaaacggcgcacaatgggaagactggacaaacgaaagcattgtaaacgcaacaggcgcaagcacgatttactacatgcgtgaaactgttgatggacataccgaagtttatttcggtgaaggtgaagcaagtcaacaagtggcgggtggtgcattaaccgctgaatatatcgggggcttgaaacctgctaatggatcgactatcgttattgaatacctgtcaaccgatggggaagcggctaacggtgcaaaagattttatctatgtcgatacattaaccaatattagcatcactaacatcgaagaaaacccgactaaatcccctgattatgtcggtgctgatggtggtggtgatccagaagatatcgagcgtattcgcgaacttgcccctgttatgcgtgaaacacaacggcgttgtgtaactgcatcggattatgaatctttcctgtctcacagatttggttctatcatccaggcggtacagtgctttactgataacgaaaaacctggttatgctttcatttctgttaaaccaaagtcaggtttgcgcctaacatcggtacagaaagaagatatgcaaacgtatctttcgaaatataacctcgcgacgatcaccccgtcgattatggatcctaactatctgtatattgtgcaatctgtcaaagtaacgtatgatatcagtaagttgacggaatcagaggaatggttacgcggtcaggttatttcgtcgatcgactcttactatactgacaacgttgaaattttcaacaaatctttcagtgtatctaagatgttgacttatgtcgatcagtctgatacttctattatcggttcggaagcagatattaaattgctccgtgaaattgacaactattacagcgcccctatgtctgggatccatttcttgaaccaggtggaatctaaatcaatcatttccagtacgttcaagttcaccaacgaagaagacgaaagttatgatgttcgttatgcttctacggaaatggatcaggatggtaacgcaaaaattgtaataggcccgttcaaggatggggatatttcgatcgctgcttatacaggtgatgactttgaaaaattaacagatgcaggaacccgtaataaatattacgaagttggatcggtttctcattacaccgatttcattagctttgacctgggcgttctgaacgtatccgccgatagtttcagcgctgcttatatcgagctaactgcaaaacctctcgaagaaaccatttttactcgcgatggttcgttgatcgtgtttgaaaatgacctgcgtcctcaatataccacattgactatgaatcctatcagtcaataatctttaacccctgtcttcggataggggtttttctttttataaatacgtgatatacataaccgcaaatttggagaaatataatgattaaagcgccttcgattacgagtttgcgcgttgataaactggctgctaacttcgtttaccttaaatgggatgatgttggcatggatttctattatgtggttgaattggcccgtagccgtgatatggacggaactattattccagacgaagagttaatctggacgcagttgggttatagctacgaaaacgaatggtttagcgatcaggttgccccaaatacacgttataaattccgtattcaaacaactcatgaagggtttgaaccttctgattgggtgatcagcgatgaattatggacgtttgatgagaacgcctacgcatatacaaccatgcgtgaattcacccctgctgattcgtttatcaatgaaaaattcgccaaaaacaatcgtgattacgtcgattttaacgatgatgttattatggcttctctgatggttgaggattttgtatactctcccctgtattctgatgtaagccagatcagcgataagatcctgaaacaagaaagctaccatgaaattcaagatcacatcgaacacgtttgtaatgatatagatcgcacgttcctggtatactcaaacggattgctttacctgtttgaacgttttcagaatatggctaaagtgtcaaatgacaaaggccaaacgtggtattactacaaagcattaaacgatcgtgtaggcaatccggtttcccgtaccattgcttatcagagcactaacactacgtatgtgttaggatacgatcgcatattttacgggcgcacgtcaacagatattcgttggtcttctgatgaagttcgtttttcttctgatgatgtaacttttgcgaagctggggaaccagtcagggttagattttgatgttgactcatacaacacgtatgcgcgtctaccgggcggagtgtcgaagtatgccgaagctatggcttgttctagtgattggctctatgtggctgctaagaacgttatgcgccgtattgcgttacgtaacacaccaattgatactgatcctggttcgccgacctttggtgaacgtatttttgatgaagtttcatatactatcgtaccaggaaatgataaaattgttgttaaaaaaatggatgtgctgaatgatcgtctgtacgttctggtaactggtgaagttaaaacggcgatgatggatccaactgtcaaagctaacgtgatcccatcaaacgatgctggcgtttatctgtgggatgagaatgcaaagacgtttacccgtgtttatggtaaaaccgaagatgaacgtttttatatcactcatgaatataccaatatgtcaaccaatggcgatgaagtttacatttctgttggtaactacaaatatccaggcactttgccagatccagatctggttgaaaagtatccggaagatgtgcattcagcggtgaaatacgatcttgttcctggttatactgcgagcatttcgattaactttgctacagttcgagcaaatcagaacgatcctactgtttggaactttgggccgcaagagtactacaatgaagcaaactttagctggcatttccgcgataaggttagcacatggatcaccaatgataaccgtcctctggtggtttatccggaaaccctgtatactctggttactgatagcgcgtctcctgcgtcaacgattcgtgtaaaccatgaagtttgggacaaaggaacagttactatctacttgaataatatcaaatttactggttttacgaagtacacaaacggtgttctgttgtatcgctcaggtggtaggataattggattctatgaactgtcataccgcgcaagggatgaacttactattttctggaaacctgataacactttaatggtggcaagtctggttaatcaggaacgtgaaaacccatacacgccggatattgaacctggactaatagatcctgatctgagtcacatgattactcgttttgctccgcaaagctatctggacaaccaacagttcgaaaaatttggtgaatactatctgcaatatatttcgttgggtagcaacagttactataacaaattgctgaacctcatccggaacaaatatccgagagagaaaaacaacgttgaatatttgtggtctgaaattaaccgccgtaacatttacctggataaaaccaaacgtgaggcagtggttagattttttgaatcacgtgcaagcgatttctattcaacaaaagggattgaggcaagttatacgttcctgtttaaattactgtataacgaagatgtttccgttgagatcgaaagctccaacagtctcgaatatgatattttggttagttcaacaaatatcagtcaggatatcgtaggccggacgatctatacaccaactggacgcgctaacgttacatacatcgaacgtgaatatgaaaatggtcaattgcgttggtcaatgactctgcataatgctcaaggtaactttatcgaagggcaggttgtcaagtcagaaaaaaccaatttcaccggaatggtaattcgtggtgttcgtggtaaacaaatggctaacaactcgatcgactatataaaccgtggacgttcttactacgtgatgaaaattcgttcaaatctaccgacttcccgttataaggatgacgtattgaggtttgttcatccggtaggattcggctttatgggtatcacgatgttaacagtattcatcaactctggtttgtcaatgactcataacgagacaatcattgatattctgagaaactaccgtttcgatagtggttatcctaagttctggcctgatcgcattgcgagcatggacggtaacggaaaccaacaattcgacctggttactggtgaacctctgtacaccgcacacccgcgagcgggggaaccttttgatgtacctccggaatatgacgttgaagaaaaaccgcttaacggtgttcttccttctgcgcgacggttcgatcaaagtccgttgttcgattgctcaggcgttaaatattcacagttccgtaatttggtggatagacgactgaaagatgatgcaggaaacccacgtgatccaaatcctccatcacagattaaggtaggaaattaaatggcacaacaaaacttgtatcggtcggtaattactgcaaaattccgaaccgaaaacttgatgaacttcaaagatatgatcggcgatgccgccgatctaaacacgatttatatgtctattgggcgaactgaatcatgggcggataacgaatccgaccctaactttgccccgccatatccaaatgatagcaccgatggtgttagtgatatgtggacgcatatgatcggggctactaaagttcctggtgatatgatagatgcaattttaccacgtaaagactggggtgatactcgctatccaaacccgaaaatcttttactttaacgatattgttgttgtaaacaccgcgccttataaccgtactgatccgggtaaaggttggatggtttatcgtgtagttgatgttcctgatatcggttcttgctccatttcgagcattaccggaaaacttgaatgtatcaggatcggcggtatctggagtccgtctcatgaatcgagtgaacctccacgcggagaagctaacgggatcgacatgggcgacggctataaatgggaatacctctacacaatcccgccagatgtcgtgatcaaccgctgtacgaacgaacatatcgtagttcctttccctggcgaactggaagaggatccggtacgttggggttatgataacgtgattcaatggtatccaggacaatacgatctagtgtatcggttaaaggtgaattcaatgcgttttcgtgcgtacatggattctcttttcttcccgcaatctacgctccctggtaacaaagggttccgtcagataagtattattgtaaacccgttgattaaaaaggcaagcccgaccgaacctgaaaagaaagcaactggtgattactataatgctaacgcgcttgaacctgattccggacgtatgatttacatggaaaacagacaacctattattcgctcccttgatcagactgaggaagtgagtattgtattcgaattctaaggaaaaacaatggcttaccaaacagcaaaaaaactaattgatgtcggtgaaatcggcaacccatcaacaggcgatccgctttatgatggtggtgttaaactgaacgaaatgatcaccaacgtttataatgcgtttggtgatgtgcgtatgctgtctgcaaacgaaggtgtcggtaacatggtgatccatgctaccggatactatcagaaattaccacgcacttactattcaagtacaccgatcgaactgggttccctgcatgacatggatacttcaacaggttcgattaccgttgttcttccttctggtaaggttggtgaaggttgctacttcataaatagtacgggtagtgtctctgttgatcgtcctatcgcgtttcgtcctcaagttggcgatacaatcgcgggggttgcagaccagttgtacatcacgtcaccttacacctttgtaaaaatctggtgtaccaaaaaagaaggtgcgatcacaacatgggattattctgtagaatctatgttcggttctaaaacgatgcctgttgacactacggcgcttgtactgaaagcaaacccgactgctattcctatgttcggatatatagaatttagcggggctaaggtgctcgtatacgcagaaaacgtagctggtacagttaccaaaatggcagaagttttaatgaccgtggatcgtgtaaacaaaacgatttattcaacggaatacgctattttgaaaaacagtgaagatgaaatgtttacattaaactttactgtcggtgctggtgatgtcgtatacgctaacgtgcaagcgatcaaagaagatcgaattaaattcacgattaaagcaatcgatacgattaaatcagggatcgcgtcatgaaacaagaaattttaataggtcaggttgtagacgatggtacaggcgattacctgcgtcgaggtggtcaaaagactaacaacaactttacagaattgtataacatgctgggggatggtgagatcccccatccagcaggtgcctggaaaacctttgcgggtacgacgctatcaccaaaatttggtgaatcatgggcgttgaataccagtgcaaacaaaatcaccgtaaacctcccgaaaggtggcgtaggcgactataacaaagttattcgtctgcgtgatgtgtggtcgcgttgggctaccaacaacgttagactgatccccgcaactggtgatactatcaaaggttccccaactcctaaagatctgtttaaagattttatggatgtggaactggtgtattgttctccgggccgttgggaatacgtcgaaaacaaacagattgacaaaatcacaacttcggatctggcaacagtagcaaaagaaacgtatattgctactcagggacaaactgacttccctaacgtattcggtgttggtaatgaatacaacctgcaatcgttcgaagtttactatcgcggtaacttgcttttcatcgatgagaaagacggattcaatgctgataactcagactatggatcgattggttctgctcctggtgaactggttgcacttgatggtaattcagtacgtcttaaaaacccgtgtaacgctggtgacacgcttcaatttgttacctatctagatgggttagcaacatggcgttcgagctatgaagcgtatgtgatgcgcatgtatcagactggtgatacttctctggaaaccgttcctggtgaacagtgggtaggtgatctggcaaccaaaaaagagtttacacctgctgaatttggtgttaaccctcgcgtgttgattaaccctaactcgtttgaactgcttctcaacggtaaacaactggttaaaggcggtgacgctgactatccggcgttttcctgtgaaggtgcggaaggtgttgatgaaagtacgtgtgttggtaactctggtgtatgggttccgtcaggacaggattatagtttagtattcactgattctgtagtgacttcaatcaagtttgctcagaaactggaatccggcgacgttgtaacgatccgttggtttaacaatgatattggtactctgatggattgggaaggaactggcggtattaaagaaaaagctgataaggtttatctcaataacgaagaagaagttatattgacgaaccgtatcgaatataccgattataataacccttctcagaaaacaatgcgtaatacaggggaaacctatcagggacgtattctggatattcaggctatgtttgatattatccacccgatcggaaccatctatgaaaacgcgcacaacccggcaaaccctgctgattatatgggatttggtggttggaaacgttacgcagaaggttatttcctggctggctggacatcaaatgcagcggatcctgatttcgcattaaacaataatgatttagatagtggtggtcaaccgagtcatacggcaggtggtacaggcggtgatcgtggtacagaaatcaaaatcatcaacgttcctgaacttgtatcaaaagataaagttctgattgctgatgaaaatggtgctgtgatcattggtggttgtcagttagatcctgatgcttctggccctggatacactaaataccgtgaggatacattgaaagtgaatcatggtaacacattacctgataaaatcaaaactattccaccgtatatgactgcacatcgctggataagggttgcataatggcttacaacaatatttcaaaaacaagggagggcgctcgcgtcctctctaaagaagcagattacttacagtatgatacttatggtaagttgcctctgatcggcggtaaacgttcgatcggcgaaccaaacattgaccaaacaaaacgcggtgttctgtatggaaacgtacaatccgcaattgatgacctgtatacgcttatcgagcaaatcccgattaacggcgttgttaccatgactgaggatgcccctccaatcgctgtacagcaggttgagagcgtttcttttgatggtattgtacagaacatcgattcagaccaagaacaggctgtagttcacgtgtacggctttcctttcatctttgataatgggactaacgccgcaactgtttgtgaaacggcatacaacaaatttactgaattcgttgcagcggaaaaatatttcgcagaagttaaccgtaaaggtgttgatggtacgatcctagaatgtcgatttattgatagtgttccgcacccggcaacaaatatctcagaaaacggtattcgtcaaatcggaactatcgacgtagccgcaaaaaatggctatggttcatgggttaagttgggttctggtttcttacctgatgttactccgcaagtaaccgtgtattacttcaaacgaattgcataaggataacacatgagtaacaatacaatcaaccacgtaagtgataaatccatttacgtgacatttgacccaacaggtactgattggcctgataccataaccaacgtacaagatgcgttggaaaaaataggtagttgggcgcgtactgatactgggcttcctatcgcaacaacttctgttcgtggtattgctcagatcgcaaccgaagctgatattaacgctggcacggataacactaagattgttactccgaaactgttagcatatcgtatgcagaaccctaaagcatcacaaaccgtatggggttatacgaagtattcgactgatgcggaatctacaaccgtaactaacgatgcatcgtctattactccgcgatcgctgaactatgtgttcaataaccgcaaaggtacagaatcggtttggggttcttctaaaatcgctaccactgcacaggcggttgctggtacagataacactgtaactatgactccgcttaaagtcaagcaagcgatcgcgtctctggttccggttcagtcaagtgcgaccgaaagctcgcaaggtctggtacaactggcaacagttgcacaggttcaggctggtacgatccgtgaagggtatgcaatttcaccttatacgtttattcgtttaactgcaactgaaagcaacctgggcgttattcgcatcgcatcacaggcagaagcaaacgcaggtactgatgacaccaaagcgattactgcgaaaaaattaatcaatacccgtgcaactggttcccagttcggtgttgtcaaattagcaacaactgttggttatgtggcaaacaccgcactttcttctaatgcttatgtattgcctagcgatcgtagtgcggtaattaatggttctctttatgagaatagcgcaatacataacaacaaatatcagacgtggacagatcttgattggcatttcccagtaggtgctattgtcatgactggtttccagactgaccacggtagtttgtatatttgtgatggacgttcactgaataaaaataattacccgttactgtttgagcgtataggttatacatttggtggtggcggtgattggtttaacattccagactgtcgaggcgttgcagtacgtggtcatgaccgtgggcgtggactaaaccctaatcgtgggtatggtacatatgaaggagatatgttgggatggcacgaacacccattacaacttatctaccagaacggcggcaacattccgaaatggcaagcagtttacgaactggaaagcgccgagaagaatgaccaaagcgctcgcgtatttgatgcttctataactaaagctactggtgtgggcggtgaagaaacccgcatgaaaaacatcgcattaaactacgtaattcgtactcaatagaggttattaaatgatcatcgacaaattaaatccgttgccgaagatcccgtttgttgatggcgtcccagatgacgccacgactcaaacgaagattctttggatcaaaaacggtgaaactctggacggttcgccagataaagtgtcaaacactggtagtcttaaccgaactggtgtaaacatccagcagaacgcggttcagttagaacaaaataccatcacccataatgataaaatcaacgaagtaatcgatcaggttaacttgattactgaaaacattgatgctattggtgatgaaagcgtaatcaaaaaagttaaccaattggatcaggatgttcaggcattaactttatcgaacacccaaacacagaacaaggtagcacagttaaccctttctgtaaatgctcagaacgatgaaattggtgaatacgatccagaaaaggatcctaaacaccgcacaattcgtaatgatatcatttacattaagaaagaagttggttcatatcctggatttaacgttgatggtgatgttgacccctcttctactggtactggccttaaataccgcgtactgagtaaccaacgtgccatttctatgcaggaaacccgcataaccaaactggaagatgactgggcgctttccgaagtaggacaactgacagaagaggtaaaagaacttcgtgctgaaatgggtgattctggtcttgccacaacccgttcaatctatgcgcgaattaagatccttgaggatggttctgttgtaatgcaaaatgaacttgatgcgattaatagttatatcggtcgcacgtcaggttcaaccagttccattaacgatcgtgtgaacagtatggaaaactccgttagttctctggctacacaaatcaacgatccggtaactggtatcactgcacaaattacaaccatcaatggtcaaattggtacggtttctgttcagggtagtatccgttatgatattgcggaaaacaaacgcagattgatggatatggaaatgattctgggtgaatccggtgatgaaggattgcaggggcaagttgcgatcttaactggtgacattggcgaagattcagatcctaccagtatcaaaggccgtttgagtgttgttgaaggtgaattacgcaccaacactagcgcactctgggaactgcaaggcgttgtaggtaactcttctagtggcctcgttgcaactagccagcaggttaacaaagaaatctatggcgatggtgttagttccgatcctgttactcgcgctggtttgaaaacgacgacccgcaacctgttcactcaggtaggcgataacgcagaaggtaacgaaacaggcatttatgcactgattgccgaccttaataaacgtgttgaggatttagaagcgttgaacattgcacaggcacttgcagatcgcgtaactatcgaagatctgaatgctaaactggctctgtacatcaaagaagctgacgcagatctccgttatgagagcaaaaacccgcctctgtcattcggtactaacctaactggtgatactgaatacactactggcgatccattgtctctaagcgtaactatgaatggtggtgtttctccgctgtcttaccagtggacgaaaaacggtgtaaatgttggtactgatgctaacacatttaccatcgattcgctacagccttctgattccggaacttacaaagtaacggtaactgatgcaagccataaagtcatcgtttctgatgaactggcgatcactgtcgcttaacgattaacaaggggcttcggccccttttgaggatctttatgattacgaacaacccagcacaattaaaagatgaaattctgcgccgtttaggtgctccgatcgtcaaaatcgaagtgacaaccgatcaggtttatgactgcattcaacgagcattagacctatatgcagaatatcattacaatggatctaacaaagggtatatcattcttaccctggggccggacaacccgaaaaatattttcgatctgagtaaagaacacattttcgcaattactaaagtgttgcgtactaacatgggttcccttgtatcgatggatggtactgcggtttatccgtggtttactgatttcctgatgggccttactggtggttctctgggcgggggtggttgtgcatcacgtacctacggaatgaacgcatacggcgcggatatgggctattttacccagatgatgagctatcagcggtcaatgcaagatctcctgtctccgcttccggattactggtataacgacgacacaggacagtttgcagtatacggaaccgttaaagatggtgatattgttgttatcgaagcaatgatcagatcctttgttgatgtacccagtatggtcggtaacgtcgctggatacgctacagcgggttctgatggtgaagataagccaactatagcagatatatacaataacccctacaaagccgtctcaggcggcgtgaaggctggtcaaggtacaggcgttcagagttcatcctctgcgtataacaaccgttgggtgaaagattacgcaactgctcttgttaaagaggtaaacggtcaggtgctggctaagtttcagggtatgcaattgcctggtggtgttgctccggatggaaccagactgattcaggaagctatgcaagaaaaagaaaacctccgtcaagaacttctgttactgtctgatgcacttccagtgttgatgatgtaagggggaaaaatgcaaaattgggatgaaagtctgtttgcacagttagaagatggttccggcgtcgatcggaacctaagacaagaagtaacaaacccgtatgttaactggtacaagtataaccctactcaacagttacatgattcactaacagccgaagcaattcaaatgaaatctccggatatgtattacgtccgtcgagaatttgttaatattgataaaattttgggtgaagaccgtgaatcgaagtttacaaaatcgtggaaaattgcagcatacatcgattcgtatgcaaactacgaaggacagagagacttttacagcaaattcggtatgatgtcaaacgatgaaatgacacttgtgatcaatcctcgtttatttgcacatcaaactgatggagggatccctgttctgggggatttgatttatttccctatggataatagcctgtttgaaattacatggattgagtttgatccgttcttccagttcggtgatcgtcctcaacgtaaaatcaacctcgttaaatttatctatactggtgaagaattggatcctaaactgcaacgaaatgaagggattaaccttgctcccgatgctgatctggatctcgaacctattcgaaatcttgatggattagcggataccaatattgaacagtacgaagaagatcaagcctttgaagatgaaggcgatgaattcattgaatcgtttgatgttgttaacgggcgcggatcaccgttcgcacagttcccataaatataaccaggggaaaccctatacatgtaagggtataggagaaatcttatacccgctttaacccatacaggaaaaataaaatgtttggattttggtataatagttcgttgcgaaattatattgtcttgatgggttgtcttttcaatcacgtgcaagttaaacgcattcgcggcgaacaagaaaaatttatcaaggttccgattacctacgcatcaaaagaaaaattcctggcatccatgaacaagctgaactatgcatacagtcaggaaaatgttgctaaaacggaaacaattttaccacgtatgaatctatccctcgttgatttgcagtataacgcaattcgtaaaactgggatcgcggtaaaccaaaaaatgacgcagttacgcgcacctggaaaaacagtaacgcagtttaaccctgctccgtatcgtctcatgttcgaactgggagtgtatacccgttacgaagatgatgtgtttcagatcatagaacagatactgccatacttccagccgcatttcaactgtcgtattacagaattacataaaaacgacattaaaatagaccgagatattaaaatatctctgcaatctgtttcccctgataccacgtttgaaggtgatacaacgacacggcgacacattgaatggtctttaatgtttgaattacagggctacctatatccgcctgttaacgagattaaaggcgagatcagaacagtatacacggatttcttttccaatatgaacccgttggacaaagataattttgaatccgttgatgctcaggtggatccggttgatatgcctatacaggattacacgggagaagaatacattcaaacgtatgctaatgatatcccaattcctagcggtgatcaacctcctaaaccgaggggccaataatggaagaatttagcgtaaaacaactacttgatcttgaaaatctccctggtgctgaaactggggaagaaatggttgtgtatgaaaaacttgaactcgttgatgtcgagtcacacccagcagatcgaaaacctgatttagaggaagactatgcacttgcgcgtaaaaccgcgcattacatgaatcagatgatcatggatatggcacaaattgccttgcataacgctaaaaactctgaatctccgagacacgttgaagtttttacaaccctgatgaatcagttaaacaattctaaccagggattgatgaaaattcataaagaaatgcgagaaattaccgaagaaaaaaccacaactaccccgcttcctgaacaaaaggataaaggggttaatatcgaaaacgcaactgtttttgttggttctcctacagagttgatggctatgaaaggtagttcttacgacgcaaaagatgcgattgccggggaatgtgaggaagtatgaccgaaccagtaatgaatccagaaaaagaatcagatcatcctttgaatatgatgcaccctaaatacctgaaacgaaaaatcgaagacgggatggaatgggtacaaagtaaccatgatgggaaatggtatccaaagacgtttaaagattaccttaaaattaacggtatcgaaaaagtaacgttacaggcaaaggataagaaaaatttcgccacctttaaagacaaagggaataagcgaagccgttacatggggatcccaaaccttaaacgtgcgtatgtccaaactcaatggacaaatgaaatggttacagagtgggttaaatgtcgtgacgatattatctactttgcggaaacatattgcgcaatcacccacattgactatggtactataaaggttaaactgcgtgattaccagcgagatatgctaaaagaaatggtatcaaaccgtttctttattgcaaaacttagccgtcagttaggtaaatctacttgtacggcgatcttctttgcacatttcgtttgctttaacaacgataaagacgttggtattttggcgcataaattgtcgatggctagtgaagttttggatcgtgtgaaacaggctattgaactgctccccgatttcttacaacctggtatcgtagaatggaacaaaggttctatcgaacttgataacggctgctccattggggcatttgcaagttctccagactccgttcgtggtaactcctttgcattggtttatcttgatgaagccgcgtttattcaacagtgggaagatgtctggttagcgttaaaaccaattatttcttctggtaggaaatcaaaaatatttttgacaactactcctaacggaatgaactatttctacgatctgtggaacgcttctctggaaggaaaatccggtttcactacatacgaatccaattggacttcggtcaaagaacgtttatataacgataaaaccgatgaattcgatgatggttattcgtggtctgctaatgatattggggcaggtagtcgagaggcatttgcacaggaacacgaaggcgcatttaacggaagtaacggaactcttatttccggctggaaactttctaaaatgtcatggattgatattgaagaaaccgaaagtaatttttatcagtataaagcaccagaagaggggcataaatatattgcggtacttgatccagccgaagggcgtggtcaggactatcacgcgatgcatattatagatattacatctatgccgtttgaacaggttgctgtataccattcaaacaaaacatcgcaccttattttgcctgatgtcctgttacgttatcttatgatgtacaacgaagcatgggtttatatcgagctaaatagcacaggtcactcagtggctaaatctttgttttctgagttggattacgataacgttatttgtgatagctatagcgatttggggatgaaacagagtaaacgatcgaaagcgattggctgctcaaccctaaaagacttgatagagaaagataaactcatcataaataacaaaaagacaatacttgaatttcgtactttctcagaaaaaggtgtttcgtgggctgcggaagaaggtttccatgacgatctcgttatggcgctggtttgctttgcatggctaacaacacaaatgaaattcgcagaattttgcgagaaagacgatttgcggttggcaaatgaggtattcgcacgtgagcgcgaactgctttatgaagatatgttatgtcctgttatcgtaacgagtggcgacgaaacaatatctgtcggccaacacggtatttcgtttatataaatttagaggaaacttaataatggctttaatctctccaggcattgaaactaaagaaacatcggtacaatctaccgttgttcgaaattcaactggtcgtgctgctattgttggtaaattttcatgggggccagcttaccagatccgtcagatttctaacgaagtcgaactggtaaattattttggctccccagacaatgacaccgctgattatttcatgaacgctgtaaactttttacagttcggtcaggatctgcgtgttgttcgtgtcgtcgataaagaagccgcaaaaaacgcaaccgcgatctataatcagatcaaaaccacgatcaccgctgctggttctaactatgcagtagacgatcaaatcaaagttaaacacaataacgttgttattgaagaagatggcgttgttaccagtgttgatgatcagggtaaaatcctgtctgtgttcattccgagcactaagatcatcgcacacgctaaacaggttggtgtatatccggatctgtctagtggctggactacagaaatcgtttccagttcttctggtgtttctgctacgattacaatcgacggcgtagaagttgatccgggtattactctgctcaaccttgacaccgcaaaagaaactattcaggcaactgctttccaggaactttgcaccaaataccagctaccgtctgttatcgcaatttatcctggcgaaatgggtagcaccgtaacggttgaaattctgtctaaagctgcatacgattcttcggctgtcattaagtcttatccttctggtaagtctggtaaaaacagcggtcgtagttcgatgaactttggccctcagaatgataaccaatacgcgtttattgttcgtcgtggcggtattatccaagaaacgtttatcgtgtcaaccgctaagggtgataaagatatctacggttcaacgatctacatggatgatttctttgcaaacggtggttctcagtatctgtatggtacgtccctaaactggcctgtcggattctccggcgttctggaactgggcggcggtacttctgcaaactccactgtaggcgctgatgaactcatggctggctgggatatgttcgcagatcgtgaatctctgcatgttcctctgctgattgcgggtgcttgtgctggcgaaactgccgaaatttcgtctactgtacagaaacacgctgtgtctatcggtgaaacccgttcagattgcgttgtattcgtttctccgccgcgttctgctctggttaatatcccactggctcaggccgttgataacctcgtagaatggcgtacaggctacaaaatcggtaatactaccccagttgataacaacatgaacgtaagttcaagttatgcgttcatcgacggtaactataagttccagtatgataaatacaacgatgttaaccgttggatcccgctcgcgggtgatatggctggcctctgtgtttataccgatcaggtatcgcaaccgtggatgtctccggctggctacaaccgtggtcaactgcgtaactgcatcaaactggctatcgaaccgactaacgcgcatcgcgattctatgtaccaggtacagattaacgcggttactggtttctctggtggtgctggatacattctgtacggtgataaaaccgcaacgactgttccaagcccgtttgaccgtatcaacgttcgtcgcttgttcaacatgatcaagaaagacattggcgataacgcaaaatataaactgtttgagaataacgatgatttcactcgttcttccttccgtatggatgcaggacagtatatgtctaacgttcgcgctctgggcggtgtatacgattaccgtgtggtttgtgacactacgaacaacacgccggatgttattgatcgcaatgagtttattgcatcaatctacgtcaaaccagcacgttctatcaactacatcacactgaacttcgtagcaacctcaactggtgcggatttcgatgagttgattggatcaacgtcagtataacatgtaaggggctgaaaagcccctataaatacacatagaggttagaaaatgcttactgatattgtacgcgcctttgaatccggtgatttcgcacgtccgaacctgttcgaagtagagatcccgtacctgggcaaaaactttaaattaaaatgtaaagccgctactatgccagcgtctaccgttgaaaaagttccggtaggttacatgaaccgcaaaattaacgttgctggtgaccgtacctatgatgactggacaatcacggtatataacgacgatgcacacacaacccgtgatgcaatcgtagcatggtcaaacatgctgcatggtatgggtgaagacattacaggggatatccctgcaaactacaaaaaaaccgctacggttaaacagaaaaaccgtaacgacgaagtaaccgccgaacataccatttatggcctgttcccgaccaacgttggtgaggttactttagactgggatagcaacaacgaagtgagcacttttgagtgtactttcgcgctagactggtgggtttaaacgctataaatacaggggtagcaataccccttatcattatttttcggagttgtaaatgaacttttttggattagacaatgtgttagggtttttcaaaaatttcgccaaacaggatgaaatggaatttgaagcccaattaaaagatgatacaggttcgattgcgcctccgaaaaataacgatggggcgcacgaaatcgaaacggacttatcaaaccagcgttattcttctgtgtttcaacagttctattccggacaggatccgcgaattcagaacaaaacacagctaataaatacataccgtggcatcatgacatatccggaagtggaaaacgctgtttctgaaatcattaacgaagcgattgttaatgaacaaggaaaagatattgttacgatggatcttactaaaacgaattttagtaaaaacatccaagataagatcatggaagaactcgataccgtaatgaatattcacgatttcgataaccgaggctctcgtttattccgtgattggtatgttgattcgcgtatctatttccataaaatcatgcacaaaaatgaagctgacggcatcaaagaattgcgccagttagatccccgttgcatggaactgatccgagaatcggtcacagaaaccctacccggtggggttaaaattttccgtggctatcgtgaatacttcgtatacaccgcaccgaaaaacggttatagctacaacggacagatttatagtcacaatgacaaggtaaaaattcctcgctctgcgattgtttacgctcatagcggccttgaagattgcgacaacaacattataggctacctgcaccgcgcggtcaagccagctaaccagttgcgtttgctggaagatgctatggtgatttaccgtattacccgtgcgcccgaacgtcgtgtgttctatatcgacgtaggtcagatgggtggccctaaagctacacagtacgtaaataacattgcacagggcttaaaaaaccgtgttgtatatgacgcgagcactggtaaagttaagaatcagcaaaataacctgtcaatgacagaggactattggctgatgcgtcgtgatggtaaagcagttaccgaagtttcaacgcttcctggtggcactgccttctctgatatcgacgatgttaaatggtttaaccgtaagctgtatgaagcgttacgtattccgttaagccgtatgcctcgcgatgatggcggtatccagttgggtaacgatggcggtattacccgcgacgaattgaactttagcaaatttattcgcgaattgcaaattcaattcaaccctgttcttgcggatccgttaaaaactaacttgatcgcgaagaaaatcattacagaagatgaatgggatgaaaacgtaagtaagattgcttttgtatatcagcaagattcttactattccgaaatcaaagatattgaaattttggaacgccgtttaaacctgatgggacaacttgaaggggtggtcggcaaatatatctcccataaatacgtaatgaaagaagttctccggatgtctgatgaggaaattcaaagcgaagccaaacagatagaagaagaatcaaaagaagaacgttttaaaaatccagaagcggaagaggaaaacttttgatgaaagaatttatcgaagcaatcaaaagcggtaatctggtggaagctaaaaaaactttttactccatcatggaagaccgcaaagaagcgcttcgtcacgaattgcgcgttgaacttgccgaagctgtacgcatcgaaggcgaagaagacaaagaaaaagacgacgaaggcgctgataaagatgacgaaaatggcgataaaaagccagccgaggatgataaatccgataaagatgatgagtgaggtgtgtaatgcaacttgacatcgaaatcaccgccgaagatctccaggaacatttagacgaagcgaaagcccgtgtagatattctgggtatcgatgaaggcacggttaaaatcatcgaaaatttggcggtcaccgaaccaaatttagcccttgctatgatggcggttgttgaaggtttaacacttgatgaggtaattgtcaagcatgttgattcccgtggcaacgtagaacgcctcaaagacaggaaaacccgtgagcgtaatgcgtatcagactaccggattaaccaaatcccaacgtcgccagatcgcgcgtcgtgctctcaaaacaaaacgtgctaacccgtcaattgctactcgcgcacaacgtaagcgcaagaaagcattgcgtaaacgtgctgcactggggctataaatatgaatgaatcccaaatcaacgaaaacggcgatatgcttttaatcgaagaatggggtttaccttgcggtgacgtttcagaatctattttagaatctgttggggaatcaaaagacggtaaattgcggatcgaaggtattttccttcaagccgaaaaggttaaccgtaaccgtcgtttgtatcctaaaaacgtacttgaagaagcagttaacgattatattagaactcaagttaacacccgtcaagcattaggtgaaatgaatcaccctccgcgcccgaatgtggatccgcgaaatgcttgcatcctgattgaaaaattgtggtggaagggtaacgatgtttggggccgcgctgttgttgttgaaggcgacggtggtgatggtgacaaactggcggcgttgattcgtgctggttgggttcctggtgtttcttcccgtggattaggtaagctctccgattccggcaaaggctacggcgttgtacaaaagggctttaaattagctgtaggcgttgatgtcgtctgggggccaagcgcacctgatgcatatgttaagcctatagtggaaaatcagcaaagcaaaccgcttgttgagaataatagtgctgatgacgcttttcgggaattgtccgagcgtttgaaaggtctataaatacattaaacaaaacaacaggaaaatcaaaaatgcttaaagaacaactgctggcggaagcccagaacctggatactccggtcgagttagacagcattttcgaatcagttgaactttctgatgacgtgaaagcgacattcaccactgtattcgaacaagctgtaaaagctggcgctgcaaaactcgctgaatcccacattacccagatcgcggaacgttccgacgaactggtcgaagctcaggtaactgaacgtgccgctgaaatcgaaactaagctgtacgaagatgctgataaatattttgcgcacatttccgaagaatggctgaaagaaaacaaagaagccgtttcccgtgacatcaaagccgatctgtttgaatccctgatcatgggcctcaaagaagttctggttgaacataacgttgtcattccggaagaacaggttgatgtagtcgccgaactggaagacgaactgactgagaatcagcaggaagttaaaaccctgtttgaagcgaatcaggaactgaccaaagaaatttcagaaatgaaacgcaatgcagtagtttcagagaaaactaaaggtttgaccgaatctcaggtcgaaaaagtagaatctctgattgaagggctggaatattccacaaccttcgaaaataaactcagcgcaattgttgaaatggtagcaaccaaagctgaaaaacccgttgacgagtctgtaaatactccgcaaacgaaagataactttgttccggtagtagaaagtgttccggcagagaaatccaagatcaataaatatgtacaagcggcaaaagccctttcttaatttcaaaaggtaagaaacaatgtctaagaaaaacgaattgatggaaaaatggaacgatcttctggagtctcaggaaggcttaccggatatcgctaccaaatccaaaaaacaactgattgctgccattatggaagcacaggaaaaagacgcagaagttgatccggtttaccgcgacgagaaaatcgttgaatccttcggtggtttcctggcggaagctgaaattgctggtgaccacggttacgacgcaaccaaaatcgcttctggtaactcaagcggtgctatcaccaacatcggccctgctgtaatcggtatggttcgccgtgcgattcctaacctgatcgcgttcgatatctgcggtgttcagcctatgactggccctactggtcaggtgttcgctctccgcgcagtgtacggcaaagatccgctggcttccggtgctaaagaagcattccatccgatgttctctccggatagcatgtactccggtcagggcgcggctccgagcaacggctttaccgaactggcttccggtactgcgatcgctgacggtgctatcgtgttccacgatttctctgaaactggtcgtgtgttcctccagaacgtttctggctctccggttactgtaactggttctaccgacgatgctctggatgctgctgttatcgccgaacaggaaaaaggtactctggctgaaatttcttacggtatggctaccagtgtagcagaactgcaagaacagttcaacggttctactggcaacccgtggaacgaaatgggcttccgtatcgataagcaggttatcgaagcacgtagccgccaactgaaagcacagtactctgtagaactggctcaggatctccgcgctgttcacggtatggacgctgacgccgaactgtctgctattctggcaaccgaaatcatgctggaaatcaaccgcgaaatcgttgacatgatcaactataccgcacaggttggtaaaactggtttcactcagaccgttggctctaaagctggtgcgtttgacttccaggatccgattgatgttcgtggcgctcgttgggctggtgaaagctacaaagctctgctgattcagatcgacaaagaagcaaacgaaatcgcacgtcaaactggtcgtggtgctggtaacttcatcatcgcttcccgtaacgtggtttccgctctggctcgtatcgatagcggtatcactccggcaggtcaaggtctccagaagactctgaacgttgacaccactaaagcagtattcgctggtgttctgggtggcgtgtacaaagtatacatcgaccagtatgcacgtggtgattacttcaccgtgggttacaaaggcgataatgaaatggatgctggtatctactacgctccgtatgttgcgctgaccccgctgcgtggttctgatccgaagaacttccagccagtaatgggcttcaaaactcgttacggtgtaggtatcaacccgtttgcgaactctcgctctcaggctccgtccgaccgtatcacttctggtatgattaccaaagaaatgttcggtaaaaacgcatacttccgcaaggtttatgtgaagggactttgatcctaattcgttgaaaaataacgatattaaagggaaccttcgggttccctttttgtttatataaatattgaaaacattcgaggctatattatgaaacatatcatttataagataacaaacacaatcaataacaaaatatatgttggtgctcactcaaccgaagatatcaacgattcatacatgggttccggtattgcaatcaaaaaagcgcaaaagaaatacggtatgaaacatttcataaaagaaatacttcatgtatttgatacccgtgaagaaatgtatgagaaggagagggaaatagttgatattgaattcataaatcgaccagatacgtataatgctggtattggcggtaaaggtgctccaatggcgttgattggatggagtgatgaacaacgcaagctgatttctgaaaatacttcgaaagttatgcaatctccagaaatgcgcgaacgtctttcaaaaatcaaaaagggaagaaagcaatcccaagaatccaacaggaagcgctcagagacgttaaaagctaaatatatgaatggacgtatagacagagagtataaacctctcacagaagcgcacaaggcgaaattaggccgttctgtatcgatagatggagttgtatactcatccggatcggaggcggcaaaatcccttagtatgtcccactctggtttaaaatatcggattaatagcgacaaataccctacctggaaatttgttgcataaataccattatacactttacgcaggaacataaaatgagtgaaaaattttacacaattaacaagctggtgcgtcagtcacagctaccgcctggcctgtctaaaaaggttcttgatgaggcaaccggaacagaaacaattaacgtagctaatacccgtccggatctggtatctcttacccgtgcggtaaacaacctgatctacggtgaacttgtagcaattcaggaaactaatttgcctaccgcaaccctgttcggtgtgcgttatcgtaaccctaaaggcgatatgacgttttccagcgctgctacctattccggtaagtatgcaagccgtgataacattccagttggtgcggttggtactgcctataccaaaggccaagtttttaaacatccgacaagcgatgtcgtatacgaagcaactgatagcgtaactctcgcaggtgctgatattgatgaagcaattatggtcgcagtattcagcaataaattacgcctggcaagcgaagccgcgccaacaagtcagtatgaaaccagcgaagatattagcacaacttctttcgaaatggatcgttggaatatcaacgttcgttcccgtaaattcaaaactgaaatgaccgtggaacttatgcaggatctggaagcaaaccaattcaacgcagaaaatgtgattgaagatgttctgggtactgttgccagcgaagaagtaaacaaagatatcatccagactctaatcaacgtatcacatcgttacaacgttgatggtgtggtaacaaatggcattttcgatgctacaaccgcatacactgcaaaggatgctccggctttaggtcgtttcctgtatcaattagtgtgtgaaatggggcaggaaatgaatagaacgacttcatttgaagctacctatgttctggcctcttctcgcgttgtaagcgttctgtctgcgtctggttggatgcatgaaactgatgaaacccacccgttagcaacaggtcgacttaaaaacggttactatgtctatactgacaccaatacaccgtttgattacctgctgactggttgcaagtacgatctgggtgaaatggatcatgttggctctctgttctatacgccatacacagaagctgatcaggcaggttcgatcaagatttctgttgatcctcaatccttacagcctaaagttgctattctgatgcgctacggtttatcggttaacccgtataccactgctgcaaacgaaagacttgtgaaaggtgatgactgggtaaacctctcaggtaaatctaagatgagtcagattgtgggtatcaaacttcctaaactgggttgatagtataacccaacggggataatattcaataggtggagtagggaaacttactccatcttttaataattattataattaatattaaattagatcttgaatttataaatgatttatgataaaatttattaattataattattatagatcaaataatttttgaaatcaagtaaaaataaatttgattttattaattagatcatgtataattattcttttaataatatattatattagatcaaataaaatttgactacaaattaatatagtatattatagatcaactgggtaaattggtgagtatgttatgagtttgaaattagaagatctgcaaaatgaacttgagaaggatatgctgatagatcccctcaagttgcaatcagaatcagcggatatcccgaagatttgggctaaatggcttcgataccattcaaacgctaagaaaaaattgatccaacttcatgcgaaaaaagaagctgatgtgaaggatcgtatgttgtactacaccggaaggcatgacaaagaaatgtgcgaagtggtgtatactgggactactgaaattaaaatcgcgatcgctggggatccgaaaattgtagaaaccaacaagctgatccagtattatgacatggtggtagatttcaccagcaaagcactggatatcgtcaaaaacaaaggatactctatcaaaaacatgttagagatccgtaaattagaaagtggtgcataatgtctactgaaaatgaaaaatgtgtagtgtgcaagtgtccggttccttctactggttttgtgactgaatctgggcgcgtgtgtagtactatctgtgctgactacatcgcagaaaaaacaaaaaacggcgagatcaacgaatccgatgatctgaatgaagttcaaatgttgctgtaggaggatcttatgattggatacggtgaaggaattacagatcgtgatgaacatcctgatttttagtgcataaatactagcgtacccgaaaggggcttgataaaagaatgctggatgataggcgtactcttttgcgccgtccgatggagtttaccttcggcggggtgattgataatataccttcgatcaagggcatgtgaatagaatagccagaatagtacagcactggcgttaagcaaatgtacaaaagccccttcctttcggttggggcttctttttagaacttttcttcttctccgctttcgagttcggcctttaattcttcggctcgacctttcagcgcatcgcgcatagaaatatcgtctgacggcgcaacatcaacttcttttacacgatttttgtaatatttttcaagctctttaaggccgtccatagtacggcaagaggcgaccttgctcatgaaatcatcaatagccgcctcataaagtcgaaaatcgttgaaactcttcattttgacctctaaatttcgatttgtttgatcacgtagtcaaacttttcttcattgtaaatgcgtactcgttcgattgcgtgtttcataccatagtttttgtatgaatatttatttttagcatttttggactttgccagcgttgctaagttatcaaccaaatcccaaacagtagcaagagatttagaatcatgtttacgcagtacgcgcccaattgactgtttgactataacagcagatttgcaaggatgtccgaagatgatgtgatgcaggttcttgacagaaatacctgtactcagtacaccaatagaaccgattacgatcagccccttcgttgattccgcgatccgtttcatttcgtttcgctcatcaatccccgtttccccagaaatgtatacaacgttgtcatatacctttttgagttgctcatacagccatttaccatgtttgatctgattgaacatcacaaacacgttttcatctttttcccttgccagtttcaacgccagcttacagatccatgcgttacgcctggtatgcgatgttatatacttgatttcgctttggtaatcggcccccttcattttcttaatctcatcctctttgtatctcatgaagatggtattaattcgaaggttggtaacttgaccttcctgcatcaatcgatttgtatcaactggcttgaagatttgaccaaaagcgccaatgtattgcatcatgtttgctttgccttctttcagagaaccagaaagaccaaacttgaaaatacactgatccattgtgttgatgatcttctgtatgctttgtcctgttgatttgtggcattcatccaccatcaaacacatgaactgctgaaaccactcaggaggcattttaacagccgattgccacgtagacacgtagatcaatgcattactgtttttagcagttcctgaacgtattccaagcattgcctcgcgaggcaaaaggcgatagtttacaatatcaccgatcatctgatcaacaagggcggttgttgggacaatgattagtactttgcctgtgtaattttccagacaccaacgagatatcaacccctggataagagatttacccgctgacgttgggaggttaagcacagcacggcggtttttaatcgcatggaacaccgattgtttttgataccaatacggatcaatctgcttgtttccgtcgtatactgggtgttcttctaaccacttgtcaaaatctggctgggtaatttcttctgtttcgtggatcttaggatccatccagatagaatacccgcgagactccgcgaattttgttacaagataggctaaaccgtagggcagtttcccgttatagtccatcaagtatatgtagccgttccatccaccatatttgtattttgcctggtactgataacctggcggctggaagctgaaatagtcgcgcaattcatagactatgttagcctctgcctgaatctgcacatgactagtgttaaggaatttgacttcgatatccactatgtgtatcctatatacggtttatatgaatatttataggctaaataatgataaacattggagaactacaatgagtattgattacgaaaaggttgaaggtttcaaagccttagaacaaaaagaagccaaattacagcttgctacctatgcgcaagaaacgtttgatgtcaaactgaaccgccagaagtcattcgaaaatatgcttgctgatctggaagctgccgtaccagcagaaaagccggaactgttgatcgactcccctgatccggaaattgttacatacgaaggtaaacaatccgttcctgatgttgttattgatgtgactaacgattttatggattacgttaaagaggttgctccggaaattgcagaccagattgaaattgttcctgacgctctacaagctactgtaagtgattctgagacggtttctgatgaactggcatggatggaagggtttaccccgtctatcatcatgatgggccgctctgtttcgaatactggcttttatacgtgtccgtattggatctatgattggatgaaacaaaatccggattggtacaagcaccctgatggttgccctcattattcagcgcgtcaaaccctcaagtcgctggcatggtacatgcatcgtgatgggatggttactgtacgggaaaccagaaacagccagttcgacacgttcaaaaaataattttaaaaagtagttgaccttaccctgctattcgagtatatttgtattcgaaggcgggggaatggctctcgcagtgaagaaggaaatacaaaatgaacatgatgaaaaatgcttactacccagttctgtttgtttggactaatggtgaagttaagaaaatcgtcaattctaaagctccttattacactgttggtgaagcacttcgccacgctgcggaagcaaattatcctgctcatgccgaacctggttatgctcgttggaacggttctaaatgggttgctgatacctgggacaactacgaagaagaaagaatggagtgtgatcctgattacgtatctcgtcaaatggaagctcatatgattgcagatcgtagactggataatgaagctcgcggattttattgattaacaaggggctacggccccttttcttttaggtgaaatatgaacttaaatcacgaatgtttaaaagatttgagcgatggtaacgagattggtaacgttatttttcttgatatcgatggcgttctaaataatatgcggtgcatgaaatttggtgaacatatggacatcgaatgcgcacgacacttacgccggatagtgaatcacgctaattgtgatatcgtcatttcctctacgtggagaatcggcaacagtacccataatctacgtgaaatattttatccgtggggattgtatcggatcattggtaaaacttgcactaacttccctcatagcactggaatgcgtggtgatgaaatcaaggcatggatcgatactttcggatgtaaaaactatctcattcttgatgatgacaccgatatgctttcttcacaaaaagatcattttattaacactgatgggtttgttgggttgaccgaagaacaatccacttatgcgatccgtaacattttcggggttactactccgttttgtcctgaatgcaatgggtatggacgtgttaacggctacgacaaatgcggaacgtgtaacggtaaaatactccggctataaataccaataaacataagaggttaaatttatggcaattccttctgtaacaattagcgccaacaaaaacgaacttttgattggcgaaactttgaccttagaggttgaaactactgaactagatccgggtgatgtgtttctggcctatcgttggcaaaaagatggtgtagatattccaggcgcaaccgccgatacttacacaactacggttgacggtacaactgctggtgattataccctgatcttaaaacacggtgctgatgaagaatcagcaacagaaaccacgtcagatacaatcaccgtgacaacttattctgatgatctcgtttctaaatggacggttcacccgattccgtggcgtgataccagctttaccccgatcggttattgggtacttgatgaaattctgtatcagaaagcacagggtaaagattggaaaactgattatgctgattacaagtatagtgaggaagtacaaacgatcctgaaagcgttcatggaaaacggtgaatgtgagatccaggattcacgaaacggctatattcataaaatgagtgaaatctaagaggctttaaatggcaactgaaaaatggactacggttcatcctattccgtggagaaataccagttttacatatcttccatactggctatacgatattatcgttgatgcttttgagaaaggcgacgactggcgcgattatgcggaagaaaaatataaattagagtttgatactctgaaagaggcgtttgaagattatggtgatattcatgtaatcgaatctcgtaatggtaaactggttagtctgttgtcattgactcctgctcctgaaccagatcctgaccaataaaataaggcaaacaatgaatacacttctttttgatttcgacgacactttagcagaattttctcagactttttatgataagttcggtgtacgtccggaaggaacgccaaaagaacgatatgacgaaatggcggcttctttggtgcgtactgatttttataaaaaccttccccgtattcaggctgggattgacctccttcaatggagtttccaacgccgaatcggtgatcctgctactttgctgcttcgcgcggaagcggtcagccctctttgggttatgaaagaaaaactgaactatactgataagatttgcgctgaactggggatctctcgtctcgattttagtcgcattgactatccggaacagttcgcagaacatgcctatcgtggtgttctgatttcccgcaaccagaaacatcttgaaatctggaacaattctcatctagctaataaagttccaggtattttccttgcggaaaccctggaagaaaatattcagctagtcacggaagcgcttgcaaaggctaatcaataacaaaaaagggaaccgcaatggttccctttttttacaatctttttaattcatcaagcgctgttttcttatcaccaacaaagaggattgctttacctcctgcttttctgaaaggcaacaccgcttttgcccgatcgtcaaacagaattcctttaccagcgaatgctgctttttcatggctacttttaacgtagtggaattctggaacgtaacccaatactttttgtaatgctttacgtttttgttcggcaacaccgtcagaattgaatttaccgacactggttagtattgctacatcgccaagtgttcttaaatgatggaataattcaaatccttctttgattggttccagattttcgtagaaatcagttttggcaatttttgctttgcactttttcaactcatcttctgtcatcatcgagggttcgccatacattggcacaaatgaaccttcccagtcgaacaatacaccatccatatcaaagaaaaacttattcatatcaattcctcagtttgtgtatgcatactataatgtttaatcattaatgtcaatcccaagtgtcagttttcggtgcgtatgctgcaactttagccacaatttccttatccagttcagctacagatttctgaggcttaccacgggctttaactttgatgtagtttgacttaacaacaaacatccctttgttacctgatttcttgatctcgctatcaacaccaactttgttaaagctgatccaaatgtcgccgtccatatactgtttaagagaatcacccatgttcaggatcttcgccatagtaagggccgcgccttcgtgggtatccatgagaatttctttaggaactacacgatcgcgtttctggttctgctgcatagcaatatgcacatcgttcataacccatacgatatgtacgttttcttttttgtatcccagcgtttcgacatcacgcgcgatgcttgccagcttgctcatgccttttaacgttacgtcaaagatgaggttaggtttacgatcttctggtgctgccataataccggaataaacacggttttggtttttgttggaaatgttgaaaacgtcggcgatcacatgatggagggtagatacgttttctgggtttttgaggttcattgttttgacatcatgacccgtttgtttcttgatctctgctgcgagtttatcgctacccattacaagttttttcagggcgtcaacgtccagtgtaataccttcgatgcctagcagtttttccagtgtgaatcctttaccggaaccagcaccgccagccagaataacaacctgaccaaacttaggataagcacggcccccgaaggtgatcagcgcttcggttaaggtgctttctgtgaattgtttaaatgacttcatgtaaaattctccagtttattttctattatttattgacatgctttctgacagtggtgtatggttatggtgttcgacggataggccggaagaactttaaaccataaggtatatgatatgaaaattgatttacatcgcttcattgcagaattttcccgcgaccgcgacatggactctttcaactactactcccgtgaaattgaagatcgttttgcggctcatgttgggttccgtcgccaccatactcctaaaatgcgccctgaccacgatccgaagtatagccctatcacatggcaagccccgatcaatggttacgttgaagggatccggatcatgacttttaacgcgatgtatggaaacgctttgatccatattgcacgtgagaaaaaggcagaattccctaacggctggcgtattgatgaagtgattcaaacccttatgcagttacgacgtgaatacaaagctggtatgtgtctgcgtaatgaacagtatccgatgtataaaacgtatgcctatatctctaagcatctaattaattccatgttttacatcgttggtaatcatggttccgctatagatatcggttcttatgaaatcgtggcttatgctcgcgaacaaggaaaggccgctgcactgaaaatcattgaatctggtgctatcattcttaaccatcgcattgatactattgcttactatggcgatcaggttgaggttgaaggcgtacaccatgaacgattcaacaaagccgtatttgctaaaaatggttatgcttatggtaatgacattataacttctgctattcctttcgttcgtctaactgttgaaggatttggagaaaggttgccttataaactgtcagaagctcaaatgtgtgcggctgctgaaagaatcgccaaaaagcggaaaatgtataccgatgaatacctggcgtatgtcaacaagacaaaagaagatgtagatcgagaaatttcttgcatggatttgtgcctttgatataatgtaagcatcttttaaagggaggatgcatgaaaacgatacattgcagaaatgaaaacgttgtttactatcacggttcgtgtactgctgctggtattgaaagcatgttattgcctccctgtgattctgatactctgtctgaaaaaggcaggaagaaaaatttagaccgtgttttctttaccgctgatatcgggttagctcgtatatacgctggaagggccgcgcgttctataggtggggatcctgttctgtacagggttgtgtgtccggttgatgttgtatgcatgaacgaagacaaaggcgcgagcgtttaccatgcagcatgggcgttttgtgaggaattatgaatgataaagtgttggcgtatctcgttttcttgctgggatatcgcttagaagtgatgggcgcgtattcatcaatgtatggtgatttaacggctatctggatggtcgggttaggggttgcttttacattcctttcctttgcaattgttaatgaatcggaaaaggatattgtatgaaactatatcatgtgatctactctggtgttttaggcattgacaaacaaatgttagttgatgtaatgtgtaaaaaactcgatgaacgaattggaactcgatacaaaaatcatgtatcggaaagtattttcatcaacgttgaccatccaaatgacatggaagaaatggttaatactcttgatgatcagcagatcccgtttgttgacaatttcaacatgagcgctggagtgtatacggtagtaacttttgttctaaaaaatgttgacagccgaaacgatagcgtgttgaatgtagttgcaaaaatcgattctaccaaaggaaaataatatgaaaattgtacaccgtagcatttccgaactgtctcaagccgaaaaagtgcaaattcatttcaaattcaatgatttgcgtaaaggttatgccgaaattgcccgtgaacatgggttagataacggcgatatttaccaggtagtacaggaaattgaacgtatccgcgcgttccgttctgcaaatctccctgttaaaaatgcaatgcgccgtgaagcgatcgaaatccatcgtaagcgtgtgtacaatttagaacgtgctaaacgtccgatgaagaaagaaaagaaacctcgtccgtttaaacgtgaacatcttaacacctctatggcgctggcgtttcaagatgcggggattatctaatgcgtaaatctgcgatggatcgttgggctagtattgctacttcaaacgtaaaaccaaatcaagccgcgcctgatgtagaagcggttcgtaaagcaaaagaacctgagatcgtggcccttagccctgaactcatcgagcatcgccgtcgtgcgtctgctattgaactggatctgcgtattgcgcgttcatataatctcaagcatgaacacgccgcaaagaacaaccattcttttgaccttactctggaagattggaaagtgttgatgacaactgaacgttgtcagtattccggcaagatgtttagcaataaaccaggtagcccatatgcccgtacaatggaacgtattaatccacgtctgggatatacacaagaaaatacaatagcggttatcaacgccgctaatgccgaaaaatcacagcttgatgcattcgttaagggtgatgtcattctggatgaagtaaaagtgaagttgctgcgtaaagcactttatcaagtcgaaaaacgtgtgaaaatgaaaggttaaattatgtttaagaaatattcttctctgactaaccattatgaaggtaagttcatcaatggtgtaattatgaacgggcttactggcggtgtgtgggttgcacgtgaaaagatccacggtgctaactttagctttatcaccgatgacggtattaccgttacccccgcaaagcgtactgatgttgttaagccagccgaagatttttatggctgttcagcagtagttgcaaagtattccccagggatccgtaagatgtgggaaaccctcaaaaagaccggaacttatgatgatttggttattcaagtctacggtgaatttgcggggcgtggtgtacagaaagatgttgattacggcgaaaaagatttctacgtattcgatatccgcgtaaatggtgaattccttccggataacctgtgttcgctgatctctcgatctcatggcctgaaaatggccccgctgttgggatacggtacttttgaagagatcaaagaactgccgatcacgtttgaatctgttgtgaacaaagcaaatagcggcattggtagcgataatacagtatatggtgaattcgtatatcctatcatggacgttgaagagggcaacattgcagaaggttttgtaatgaaacctgtttcacctgcttttatgccaaacggtgaacgcgttgcaatcaaatgcaaaacaaccaaattcactgagaagaaagcgaagaaagcaacccgctttaatgctccggtttcactgtcagaaaaagacaaaaaccaactcgatgagtttgtttgttaccttacagagaaccgtgtgaaaaacgttctttcgaaactggatctggcttcgatcactgcgaaagatttcggtcgcattatgggcttaacggttcaggatgctatcgaagaaatcagccgtaatcatgggcctttcctcgaacagttcgaagacccagcaatggctaaaaagttgtttgtaaccgaagcccaaaatatgattcgccctgtatggggcaaaatcctgaaccatgaattttaaactatgaacagtcacggaaactatagaagtatttctgatgaaatagccgcaataagagaactccttcaatacgtttcagttgatattacttctggaaatatcgtatggtcttctccgcgtcaaggtaggagggttggtgattccgctggtactatgaaagatggatattgtgttataaagtttcaaaagaaacaatatcgcagacatcggatcatcttttatgttgctaatgggtatcttcccgctcttgttgaccataagaatggtgttgaatttggtgatggtatagataatttgcaagaggcaacgcaacaagagaacataagaaagcagataaagaaacgaagcaatgcttctggaaaaagaggggttatttttgataaaagaagaaataactatcaagcgcgaatagttgttgatggtaagcagatttttctaggttcatatgataaccctgaaaaggcttatgaagtttacaacgaaaaagcaaaagaattgttcggtaatttttatgtcgaatgattttagtacagtaattaaaactgccaagacagtaacattaattggcagtcgtaaacctcctgaacgtatcgcaaacattgctgttaaaatcggacgtgctttgaacgaaagcgggatcagggcttattctggcggcgctcctggtatggatagtcactttctgtttgactatagtccggataacagatgtataatccttcctgagaacgggtttaacggccttttctcaaacggaaaggatatcatcgactttcgagatttaaacacacagaaagccgctgacgaagccagaaaggtagcaggtaacttcgatacacagaatgaatacgttcaaagaaggtatgcgcgaaacacgattcaagttcttcgtgaaaatcttgacaatccaactgattttgttttattttgggcggaagaacgtgaaggatgtgttaaaggtggaaccgcgatcgctgtaagattggctaggttgtacagggttccatgtttcaatctcttcaaagaaagtgtattgaacgatgtgtgtgatacgttagggatcaatatcaaacccccaacgttggattttttatggtaattgaacatgcgcccttacttcgtgaaacatacgaaagatgggctgttaataacgcaataggtgaaaatatgattcatgtacgtagtatcggtactgacggcgaaactccggtagaaggccgatcccccactctcgcagaacgagcaagagaaattatcaacgatcagaatgctaagatgatcgaacatgcgcgggatacaatcacaaaaggtgttctgaaacacgcgacacaacaaaaccttatctatgatatgaagcacgatatcggctcttgtctgggtattgaatgtactcgctatgcattccaacgagtttctgaatggttggaagaagaagggctaaaattcgatacagaagaaaaacgcaacgccgctaagatcacaaattctctggctagtaagtacaatcaaacgtatagaaaccaggaagaacgtgaagtgttcggtttcaaaattcctgaaaggaaaacagatcgccgtgtaagtgaattcactttttacattagttggtaaaaaggtgttgacgggggttggttatagtagtattctaactcccgtagacaagacactaactcagaaggataaacatcatggaaatcgtaatgaaagcaacttatgctggatactgcctggaagcaaaaggtgttgctaacaatggtaaaggcttacgggccaatgttgaagcaatgctggatgaattacatgcaatgtacgaatatgacaacgtagcgggtagtgttcttatccaagcgttggaagtcgatggtgttgattgtgctggttggtgggatgcttacattgactacaacgataaccgggtttacctgttgagcaacaaagattatttctaaggaaccattatgagcgatgaagctgaggctttagaagattgggctgattttgatgacgaagaagacggtgaatatttctgcgttaatcgtggtgcttataaagaccgtttagaactccgtaaacttttatcgggttcctctcaaatatcaggatccaaacgaaaaagtagtaaacaaaaagttcagtatagtgatggttctgtacgtgatgaaactgttgttgctgaattccgtggtcgggttatcacaaaagaacgacaaattgatgtaaagaacttgtatgaagtggctaaggctgctaaaacaggttctgtgattgtttgccctgtgtgcaaagaaaaacacacaaagacaacgtatcacaaagttttctgttcgaatggcagaaaaaccagtaaggattgtaagtctaaatatcacaatacaatctatcccgaacgactggatcgggtattttaaaataaacttaaaacgtggagtacgtttatgaacaacaaaactttcgaagaactgaacagcatcatcacttccgtagattcctataaggtttctcactggtcgcaatatccaactggctccgaagaggcgctgttttatattgaatctcgtggtggtaaatttgatcaagtagttacggctggctgtaaccgccttgcgcaaatcctatcacgtccggtgactatggaaaacgtagattttgctaatcggttgtacaaaatgcactttgggcgcgaaatcttcaactacaaaggttggaaagaaattgcagaactgggttacatccctcttgaattcagagcgattccggaaggaaccccagtagcggttaaaaatccggttgcaactttccatgctgggaaaaatgcgctgtggttagcaggacacgtagaaaccctggcgatcaggggagtatggtttccttcaaccgtagcaactctatcccgcgaatgtaaaaaagtgttgaagaaatatctcaagaaaacctccgatctcgaaggtgaagcatttgatatggtattacgtacccgtttgcatgacttcggcgcacgtggaacctcttctgctgaatctgctggtattggtggcctcgcgcacctgtataacttcctcggtactgataccgtagaagcgctgattatggctatctctctgtttgaagattgtcagaaagcgtttgatgatggtgaaatggcggctggtatttcaattcctgctcgcgaacattccactaccgtttcttacggcaaagaaaacgaagaccttgcgtacaaaaacagtattgagatcttcggagaagggatgtatgcatgtgtgtatgattcctgggattttaaagcggcggttcgccgtatcgcagaatataaagattctattctttctaagggcggtactctggtagttcgtccggattctggtgatatggtagacaatatcatgtacgctcttgaagaactgggccgtatctttggctatacagtgaactcaaaagggtataaagtactacacccagcagtaaggatcattcaaggtgatgaaattcatggccctgaaacaatcaatcgggtgttgaactggatggagtctaaccgttgggcgtctgaaaacatcgcgtttggtatgggcggcggattgcttcaagaagttacccgcgacactcaaaaatatgcgatgaaaatgtgcgcaatcaaaattaacggtgtgtggactggtgtgtataaatgtccaaaaggcgctgaatggaaaaagagtaaaaaagggttgttgatgactatcactgatggtgttaactttaaaaccattgatactctggaacagaaagtgccggaaggctggaaagatgctatgatcacatactatgtcaacggaaagattacttcccgtgacactttagaggaaattaggaaccgtgccgggatttagtatccgcaaaaacgacaaaggaaccgtgattttctatgacaacatgccccttgtagctcgcaaggggctttttgctaaaatcgctgggtattcctttaaactggaagaagtcaacgacgaaacactaaaagagatcgtaagaattgccttacagttaagaggtaagaaagacgaacaaagagctattgacatgatcaataaattgggcgaaactcaatgcttcatagtgaatcgtggttacaagtacgataccattgcaaaatttgaaaaagggctttgtgaattatgagttattatggtgtgatcccatacacaggaaacaagcaaaagctacttcctgaattgttcaaattatttccggacagaaacagctatatgcgattcattgactgtttttgtggtggtttgagtgtgtccctaaacgtccctaaacccgttctaagcaacgattacgatcggacgttgattgatatgtataagcgccttcaaatgcttcctgacctctctccggtgcgagaattgattaaacaacatgggctgggtaagaacgagaaagaagcgtatctcgcatttcgtgatgcatataataagaacaaggatccgctatggctctatgttctgatcctgcattcgtttagtaatgttaatcgaaccaacgataaaggcaattttaacgccaattttggttgtagaacgttgaatgattctaccgttaaacggtttgaacacttcaaaaacaatgttcggggaattgaattctctagcgcatcgtttaaggatcttgatatctgtttgaatgattttgtgtactgcgatccgccgtacctgatcactgatgcagtttataacaagttctggaacgaagaacgcgagcatgaattatatgattttctcgataatttaaactctgatggtatcaagtttggtttatcaaacgtgacacatcatgcaggaaagcaaaatgatatcctgatcgagtggatgcaaaaatataatgtgcataacctcgataaaaagtatctgttaggccagcatactgattcttacgaacaaaataaaacgcaagaagtctacgtgtgcaactaccagaaacgcgacgtaaatacataccctgaaacactggatgacttaatgtaaggtaacatatgtttaagatttttggttatatcccttctgtttacaattgcgctccatgcctgaattctaaacgtctcctggacgcaaaacgaaaagaatatgagtttgtttctgtagccgatgaaaaagacgcagacggcaaaccgatcctgaatgaaacggtcatttctgaactcgaaagcctgttaggtactcgtagactgaccatgcctcaaattttccacgatggtaagcacatcggcggctttgaccaactgcgtgagtacgttcgcacgttgggataaatattaacacctttatttgattggtgttattatgctcactaaacgtattactaagaaagattatccatccattaaacaagctctttttgaacagcaaaacggcttgtgcgcgttatgtggtcgccctttagagggtggccttgaaaaacatcaccttgaccatgatcatgctctatctggctctaatgccggacgtgtgcgcggcctcctatgtaacctatgcaacggtacagaaggtattgtaaagcacaaatttaatcgttctggtctggtttcccgtgatgttgattacatcgaatggctagaaagcctggtagcatacctcaaacgcgattattcacaaaaccgtatgcacgacaaatttatacccgataaggttaaatggtttacacgcctgactaaatcggatatgatagccgaaatgatttctatgggctttgagtactcagaaactgaggatcgcaaggctttagcaaagagctatagaagacaattaatgaaggcaaccaaatgaaatatctaaacgctcgattatcaacgaaacagaagaaaaagctgatgatgttgatatccgccactgacaaaaataccatatctctgcatgattggatgcttggaatgggtgaatctgatttgtgttatgtcaaaccaaaagacagaccgatgtttgatgatcgcggttgcacattgactgctttttcttctatccccgttattgatatttggaaactccttgagattgtaggacgggatatacccgttgatggagttgaactaatcaaatatcttaacgaaatcggacataatttagatattatccataaggcaacgaaatgaatgtagaaaaacgagacggaacaatcgtcgaattcgataaagaaaaaattcgtaacgcagtttataaagctggcggtacaatgacggatgaagacagcgcaattatgcttgtattgcatagtcagatccgcaatggtaaaccaatgaagatttcacaaattcaagaacttgttgaagaatctttgatgaagacaaatccgactgttgcccgtgcatatatcgaatatcgtcatgatcgtgatatcgcccgtgaacaaaacggaaaattattccgtgatatcaagggtttgatgactcttagtaacaaagaattaaccaacgaaaacgcaaacaaagattctcgcgtattcccgactaaacgcgatcttctggcgggtatcgtttctaaacatatggcgcgtaaccatattctaccgaaacatattgtagaggcgcatgattccggtgatattcattatcacgatctggattacagcccgttcaccccatacactaactgctgtcttgttgacctgaaaggcatgttagaaaatgggttccggatgggtaacgctgatatcgaaccgcctaaatcaatcggtgttgctactgctcttatggctcagatcaccgcacagattgcttctcaccagtacggcgggacaacctttgcaaatgtcgatcaggtgctggccccttacgttgaaatgacgtacaacaaacactttaaagatgctgtttggtacggggttcctaaatcaaaacagtatgcgatggaaaaaacagaaaaggatgtattcgatgcgttccagtcatacgaatatgaagtaaacaccttacatactgcaaatggacagacgccttttgtcacaatcactttcggtatgggtactggttggcgcgaacgcatgatccagaaagcgattctgaaaaaccgtattcgtggactgggtaaaaaaggcattacccctgtattcccaaaactggttatgtttatggaaaaagggattaaccttaatccggaagacagaaactatgatattaagaaattggccctggaatgtgcttcaaagcgtatgtatccggatattattagcgcggctaataaccgtcgtattactggctctagcattcctgtatctcctatgggttgtcgtagtttccttagcgtgtggaatgatgagcacggtaatgaaattcttgatggacgtaataacctgggcgttgtgacaatcaaccttcctcgtattgcgattgaagccgaagcacaggaagatgaagacgcgcatgatgcattttggcgtatccttgatgaacgtctggaactgtgctttgaagccctgatgactcgtatcgatagcctacgcggtgttaaagccagtgtagccccgatcctttatacagaaggtgcgtttggtgtaaggttgaaacccgatgatgaaattctggaactgttcaaaaatggacgcagttctatcagtctgggatacatcggattgcatgaaactctgatgcttttcggatctggacaacacccattcgaccggatcggttctcagaacatgggtagactgattctggaatatctacgcgctgcgaccgaagcatggaaaaagaaaaccggatttgggtttagtctgtactcaacccctgctgaatctctatgtcatcgtttctgcaaactggactatgagaaattcggaagtatcaaagggatcacagataaaggctggtacactaacagttttcatctggacgttgaccgcaaggtaacaccgttcgagaaaatcgactatgaagccgattttcattacattgcaactgctggacatatcagctatgtagaattccctgatatgaaaaacaacctagaagcccttgaaaaagtatgggattatgcaatggataaactggactacttcggaactaaccttccggttgataaatgttttgaatgtggctcggatgatgaatttaagccaacagaagacggttttcattgtacccattgtgggaaccatgatccggaaaaaatgagcgtcacgcgccgtacatgcggctatttgggtgctcctgctgtccgtgggttcaacgaaggtaagaacaaagaaatgatgcatcgcactaagcatcaaaattaatcaaaaagcccttgacttcggttgagggcttttgttatattgggcctatcgaaaaggagacatattatgaaactgactaagaaaatgaccgatgtagtggcatgtgcgtttgcattaggctacaaagttgaaaatcatccaactcgcgttgaagtcatcaaccctatcaagggccgtcctggtttggttctgtgtgaagacggcacagcatatcgtaatgatgtctctttagaactggcaactactatccgcaccgcaaaacaaatgaaagatgttctcattagcggcgcaaaattgagggctttatgatgtattggacaaaagataaatttgtttttcgtgatgatacgtgctttgggactgcataccgaaacttggctattcgtggcggttcgttttcggctaatgatttgtctaaggtagtatttcctattaaagttactgagtatgacgtattcggtgttaaaggatttactgattactttggtacaaagtttgaatcagaatcttacatttttactaatagcgatcgtgaattattcaaaaaacacgttgttgttaaagagaaaccgttattaccaaaagaggatgaagcaaaggaaatctatgatctcctgaacatgcttgacaatctcggtacttgtcatctgttcggtaaacgcgcccgtaaagcgaaagatgttctcaacttgttgcgctctcgccggaattacctgatccgggaagctgaacgcaatctgaaaaattcagaaaaacaggctgaaatccataaatccacccttgctaaattaaaggctttgtgatgtttccgttatacgctaaagtgcgtcgaaatgtcgggaattcatatcaggaatggagtgaatggctacgtgaaacaaagtcattctacatttcaaaagcaactgatatgaaaggccgtaacattcgctatcgtaaacccagtggtaaacgagtgaatgggatagattacattgttcttgattcgattcgggatgatatacgataatttaactttgaggcaatattatgattttcaacaaaacaaattcacgtaatttgaactatctacgctgtgaactggaagctaacgaaattgaactgtttttctgtggggctacagatccggaacacaaattgcattgggtatcaggtgagattgtaagcctaaccgaccagattgttgaagaggctacccgtcgcgatgcaatagttaaaattggtgctgttgatgtgaactacgaagggcatccttcatttttcattcaatattatccataaaagtattgacctgtatatctgaatgtagtaacatccttcttgtcaactaaggaggatgttatgaaaatcaaaaacactgctactgaaactctttgcaacgaaattgcagaaatgtactggagtaaaggtcacttagaggctatgaaagagtttcaaaagtggtgtgatacccaaaagttagctaaatgggaatacatcgttattgttgaacggatcaaagaactgatcctcgtgaagaaaggtaacatgaaatgattcaactgaaattagacacaaatgcggtgttaagcctgtttccggaaggttcaaccgcccgcgtagatctccaatctgctatcatcaaaaacgtggtgaataacgtagttggtaagcgtgttagcgaagaaatcaacaaacggatccaggaacagttagctgttctaatgccgaactcatccgaaattacacagatcatcaaatctgaattctcggattacgtcgaaaaacgttatgggtattccaatgtttttgatgtcaactatggcaatgttcgcgaactgtctggtaaaatcaaagaatcggtaaaacagcaatgccaaaccattcttaaagatatcgagaaagaggcgattgctcatgcaacagaaaacattattgcagacgaagccgcgtttatcgctcgcgtctcgaataacctggaagttactgtacgcaaagcagtaatgcaacgggttaacactcagttcccagacattattgacgaagcgatcagagaacgtctgtttggtgaaaaagcatgaattacgaccgcatctataatatggatgtggtcaacggaaaagggatccgtgttgttttgtttgtgactggatgcaatcataaatgcgaaggttgttataacaaatcgacgtggaatccttgcaacggaacaccgtacacggaagagacagaaaaccatctgatttctctgttgagtaatccgcatgttgatggacttacattaactggcggcgatccgctttaccgtgacaactatcctactatcctaaaactgcttgagcgcgtttctaaggaacttccaaagaaaaacgtatggttatggacaggatataccctggaggctttacaggccgacccagaacgttctaagctacttccttacattgatgttctgattgatggtaagtatgaaaaagatttaccaactaaaaagccgtttcgcggttcagataatcaacgtatgatcgaattcgctaaaaaatcgatagaaattaaaaatatttcttgacctaatgtgtaactatggtaatcttaccacatcgtaaatgacgattaactttaattgagagataatatcatgatcctgaatttcaaaacccgtaaagaagcgcgtaactactgctggaagtggaacattcccctgaaaaccatccgtaatacagggcgcggttcttgcccgtggacagttcaagcaaatgaactgaaaacgttcgtagttggtaaaacttacaaactggttgaccgtgaagggtttactaccaattcacacggcggatctaacaccgcaaacactatccaggcgagacagatcgaaaaattcctgaataacgaggtaaaaattatctcgaaaaccaattcagatactttcaaaattgagcatactccggaaatgacttttagctctctgcgttcgtgggaagctcgttatttcgtcgaagttggcgcggctccggttaagaaaacgaaagctaaaccgaaaaaagccaacgttacggctccggttgcgcctgttgcaccagcaaccgcagatcttgatcaaatgcttgatggcggttcggcaatgtcggttgaactggatccgactaaatttgttgaaggccgttcgtatgttctggttaaaccgcagcaatttaaaaatcgttgtggcgctaaccacgggatcaaatcatataccgatgaacacagtaatggtgtatacaccgtttaccatacgacttcgctcggtcatcatcaattgagcaaaacggtagaaaccattgattcccagaccggaaacggaaacgttggttactatctgcttgattctgaacgttcgttcttccgtgaactggcgaccggaactgttgatgaacctgttagcgtttccggtaatagcgctatcgctatcaatgtagacgaagcagctaagaaagaagaaatcgcaaaagcaatgacacagcttgaagaagcggttaaagcccatgatgacgcgcttcaaaatctgcgtactgcttccgacctggttcgcaaagctgctcgaaaagtagcagaagtaagcaagtaaattaaactgggtgctccggcacccttttttatgaggtgacacatggaattattagaaggtaaatcttataccctgaacatcgacgctaaagaatttgcagaaaaaacctggcgaaatgctttagctgaattgatcaaaaacaacggctatattacaatcgatcgtattgcgattggggatactgaggacattgcttatgttctgcaagatgatttcgaatatgagatccctagccatatctggaaatacttcaaaccatatgatttaccggaagaagaaccgaagattgctactaaagaagaaatcgccgcgcctgatttaaatttcgtatcttccgatcctaaaatgtggatgactgtaaaacctgttcaacaagatatcaatgatctgcgatttgattatccttttgtcaagcggatcacttcgatttctgtactaccagcgccgactgattcacaggcacttgaatttgcattacagcatgttttcggtgataataagctgtacgcgattgacaaggaagctgctattgatgaacagaaaaaggaaatcatcaaccttctttctctgcatcaacaacttgaagcggtggaattgattgagcgtatgctttctgatacaaagaaagatatcattagcaaaatcactccggcacgaaggaaagcaattgatgaaaatcgagatttacggtattcccgaatcgcttcataaatgttacggctgtattgaagctcggaaattacttgatgagcatggattagaatacgaattttattctgttctaaagccagcaaataacagtgtggggtttgattacgatcgaccccgcattgaagagttagcgaaacgtgttcgtagtcgaagcatggcatttacttaccctcggatctttgtagatggtaattttattggcggttatatgcaattgaaagagtatttgggtgaagcatgaataaagaatacattcgcaaagtagcaaacgctattcacgcaacaacgattgattttctggaagggtttgatcatattatccaccctgaaacgctggatagttgggaagccaaactgtttaaaagtatcaatgaacagtttccggaaaaggttaagcgctggtttatcagacaggaaatcgtagcaacgatccttaatgaacgtggtgttgaggcgttcggtgtaacccctctatataaacgaaaccagattacagacgaaacaatcaagaaatataaaaagatggttcggaagtaataaataatcagttaaatggccttcgggccattttttgtatataaatattggtattgaatacaatataggaaaaaagataatggtagctaaatcattccgcgcacgaagtggccttgatgctgctggtgaaaaagttatcaacgttgggaaggctgatcgtaatacgctgagtgacggcgttaacgttgactttttcaatgaatttaacggaatccagcagtatgacccgactcgtggttattctcaagacatggcgatcatttatgcgcgtcgtatctggtacgcaaaacagaatattgcttcccctgctggggctttcgacgaatccaaatggatcgcaactcgtaatgacccgaaatgggtttatagtaacgtaaccactccagacggtagcattattgaatctggtagttacattatggctgatggacgctttactgaacttctgtacctgctgccggacaacccgacagagggcgacgtaatcacgtttaaagattgtggtggtttagtaggtgtgaacagtatccttgttaagtctaacacccgtcagatccgtttacgtactgtacaatcggcacagtatcgactgacccacccgtacatgatcgcaacgtttatctataacggtaacgtatggcgtgttgctgaaactctggataaccgcgattctgagatcgtgaacgtaaccggaacaggttcattccagttacaatctggtatgacagttttccgtaacagtgctacgggtaaaatcactctccagttgccgaaatatgcaaatgatggtgatgtgatcacaacctatgacgctgataaaatgaactctatcaacgtagccgttttgcagatttatccaggtagtggacacactatttctgacggtgcaattactggtgttacttcggtaactagccagaaatctggctttggtatgttcatctttgatgcacagaatagccaatggaaagtatatgatgctgataatcgtgttcgtctgcgtcgtatctatagtgatttaaacacagttcctaacgattacgtttttgttactgcaaacccttctgggactataccaaacgttacagttacccttccaactgatgttgctgatggtgatcgcgtttacgtatccctttatatgatgggtaaaaaccagaactgtacaatcaaagttaaagatggtacaacggacaagatccgcaccaacaaaaatatgatgcagttcccgcagcgcaaagactatccgcctgatgattggtttagtgtaacttcattagcatttaatgctgctagtgattacctcccgtatatcgagttttcttacatgaaagctacgaaagaatgggttgttgctaattatcgtccgatcgttgaacgtgttgacgcaactaacagatcgcgtactggtgttattgctctggctgcacaggcagaagtaaacaaaaacttggaagacaacccgaacgacgaaactgctattactccgatgacgttagcaaataaaactgctacagaaacccgtcgtggtattgcacggttagcaacaactgctgaggttaacaaactttcaaccgatacctatctggatgatgtgattgttacccctaagaagctgaacgaaagaacagcaactgaaacccgtcgtggactggcagaaatcgcaactcaggcagaaaccaacggaagcaccgatgatattactattgtaaccccgaaaaagttgcataaccgtattgcatcgccgaccttgactggtatccttgcccttgttgctactggtggtgctcctaacaccaacacggatcgttctcaggctggtactggggtttatgaccattcagattatcagaaagcggtaacgcctaaaactcttcgtgagtataaagcgactcagttacaatctggtgttgtatggctggcttctgaaaccgaagttattaacggtactgttgcaagttcaaacgttccgaccgttgttactccggaaatgctgcacaagaaaacctctactgatggtcgtattggtttgatcgagattgctacccagacagaaaccaacgcagggactgattacacgcgagcggtaacgcctaaaacgcttaatgatcgtgctgcaacggaaacgctgacaggtatcattgcaattgcaaccactgccgaagtatcagcaggtactgtaacgaataaagcgatcgtaccgtctaaactgaaaggttatctggacgatacaagccatattactgttgctactgctgatgggttaactcaatctggtactatttggactacggttaacatcggtattcaatcagcaactgaaactcaacgtggtactttacgcgttgctacgcagtctgagacgaacgcagggacattagatacagtatttgtcacccctaagaagttacacgctaagaaagcgactgagagcgcagaaggtatcattcaggtggctacggctgctgaaactaccgctggcaccgttgcaaacaaggctgtttctcctaataacttgaaaaatacaattcaggttgatacttcatggcaagctaccgatctggtacgtggtactgtgaagctgtctaaggggcttggtacttggtctggtaatgatgtggctggttctactcttccggatgatggttatgccgctgtaggtgttgctgtttctccgtatgaactgaacttaacactgaaacactatctaccgatcggtgctaaagcggttgatgctgataagctggataatctggattcttcccagttcattcgtcgtgatattgatcagacggttaacggggcattgactctaacgaaagaaaccactgtacaggctaacattaactcaaccgccgacgcgagtttccgggtaatgaatgttagtggagatctgaacgttggtgatggctcatcgatgggtaaacttcgtttgaatggcggttcatctaacgactggtcaattcaagcaagttcatcctctgggcgtattgcaatgatctcaacgggtaacactggcacagttcatctttctgtgtataatgatactcgcggcgttgtagctaacgttaaattccaggctcctgaaattcaggcgattggcaaagtgactctgggtaatgatacagtgatcacggctgctggttctgttctctctatgggtacgaacaacaagacaactaagatcctaacttcggacgctggtaacattttggcagaagaatcagggaactcttataaagtctttactgagaagaacgcgcaaaccttgctgaatcctacgtatgtacgtaaagcaggtgatacgatgtctgggcgcttgacggtaagcaacagttcaattatcattgcaggtcaagaggcttggtcaacgctggatgcagtaacagaagcatccaggggcaactggacggctgagatcacagcatcggcacaatacaacttgcttcctggttatgcggttccggttcttgaaccagatccgattaatccagaaatcatgattgtgacccgttatacctatgttaaagcaccgggtactttaacgcagtttggtaacggaactgcattcacttatcagatttgggcacctcgtccgacctctggtactggtgttaatgcgctggcgcaatccttctggatccgtcaaatgaacccaattacgggtaaatttgatggttggggccgcatgtatactagcaacaacccgcctactgctggtgagattggtgcaacgtctgctgttggtactacggttaaaaacatgactgttaccgattggatcaaagttggtaatgttaagatttacccagatccggttactcagacagttaaatttgagtgggtggcataatgtcaaacttaatggcggggttcggccccgattttgtagaaacgcaaattctatcggaaacaaacagcgtaacttacagaataaccgcaaaggcaacacatcccaatgcggttcctaatcagtatgagtttacactaaatcaaaaggcggtagggacaccgcctagtgttgggatcaacgtatggagaattaacaatgctgtagttgatccaattaaaaccttcacattatcgaatgataattcagcaactgcaaacaaagcgtttgttgaatatatggatgctcaaccttctgggctgtatttgataatgactaacggtgaatacaaaacaagccaaatcgttgatgattggtttgctaaaaacagatccgttatgtggcaaggcgctgatttcgctcagagattcccaaattctgcatatgttgcattgtatggggcttcaaaatctcgtatactgattgaatcgttttacgcgaacgatggagttttaaaagaagattcacgcgcatcaatcgatcttgtctatgataacgttggtgatgttgggcgaactggtgtacctttccgatctgttgaagatacggaagaatacaattcaaccaatgggtctgaatataaagtatatcctgttgcaaacccagtgatctctaaactggctgattatggtatggctcctggattagctatgatgattgctggtgatttttacgccagcaaagcattattggatgctggatcaacaacaagggttactgttcgatggtttacgggtactgctcaaacttcatcatcggtgattgaagttcctgcaaataaacctgatgagtggttacgatttgaacagttctatacgatccctagtggttgtgatggatttaacgttgctgtatctcgttatcctaaacccgctacggatagtttatctgcgatccgtaactttgtgatggttcaggtatctgctgccgaagctgatcaaaactttgctgcacagtttggggttaacggtatcagaatgaacaacatgatcgatggcggaacaccgtatatatttgaattgcctaatactaaggtttatccaggtggtgattattctgcttccgaattccgtgaagttgatgcataaacaaaggcccggaacatcgggccttataaatatgtaaaaaggggttattatggcagatttaaaagctggttctacagtcgggggtttacctatttggcactccggcacatttccgctggttccggttggtaatactctaacctatcgcggatataaggtttatactgaaaacgataaaccgcaagcatcaaataacgacttcgtttctaaagcaagcggtggtcaatatttgggtgtagttgcctttaaacaggggctaaaaattaacgctactttcacaggcggaagtgaccagaacggtttatattctggtgatggtgatggcgcgacattatcaaaagccaacattgatcttgtatcatggtatggtattggtattcgttcatcttccggtactaatggtcgcgtattagtcatcaacgctcgaaatggtgatttaaacactcagggtaatattacggttgaaaagcaaatcagtattacaaccgctaaccctactgacgcaagtcatgcaacacgaaaaagttatgttgatggacagataaataatgtcacaacaaatgctaatagcagggtattacgcgctggcgatacaatgacagggctattaactgccccgcaattcgcgagcacaggcgcggcttcccgtcccgaacacgtaccacggctcgaccaggtaattactaaagggactatcatagattttggatcttattaaggtgaaacatggctgatttagaaaaaattcaattcctacgtagcacagttgcggggaaaacacctactacaagtcagcttgcagatggtgaactggcgatcaacatggctgattatgccatttacacgaaaaatggttcttcgatcgttcagttagcgggtaaaggtatcccagaaacaaataccaaaaaattaacagttgatgggcctagtgctcttaatgataccgttaccgtagcggaaggtaaaactattactttcaccaacgagaatttaagtggtgaaataactcgtcatatcgtcggtaaatgtgccagcaatgatggatggtacatcggttccggtggtacaagcaataacggcattcttgaaatcggtactattgacgatggtactgaaacaatccagtttgtacaacgcggtgctggtaacgtagaagccagaaaattagtcttacttgatagctctggtaatactactcttcctggggatttaagattatccactaataaaaccgttaaaattaacaacggaagctctcttgtccttgaaatgggtgtaggctctaacgatgcctatattaaaaaccaaagaggcgtaggtgttcttcaattaactaatgatagtaacctgacgttcagaaattcccaggtttattatgctatgagtggaagaggccctggtaaagatggtactcttctgactaatgtagaaaacgagcgccaacttaagcaagataatttccctatatctacaggcaccgaagctcggtggactaaagttgctcttttaaaagatcgtggatcaagccagagtcgcctgcaactgatggtgactaacggcggtaactatggttctacgcgtggatctatcgactttatcgattgtagcgctagaaactttccatccactttaacaagcgctaatattcgtaatcatctacaggttcgtcgaatcggtgatcctggaattgataacactaaccaaatgcgttatagtctggttcgtacctctgagggtttagaactgtggtttactcaacgcgcattcattagtagtgttaaagttgctctgctgtctattgctggtgatactgagtattatctgcctactggttacacaacttctgcaactgctccggaaggtttagttgagagtgtggctattcgtatctatgacgaaattaataaacctaaccttgacaatggtactgatggtattctgtctattgctaaaggtggtacaggcgcaagtacagcggatgctgctcgtacaaacttagggttgggtactgctgcaacccgcgatgtcggcgaaggtgctggtaatgttttagaaaatggcgcttatggcttaggcggtaatggtggtaaatccatcaacgacattatctctaatgcggatatgttgacccgcttaaaatcatacggcggtactttctggcgtggtgttgctaaatctggtgttagcgttcaaaatggtctttatagtcatggctctggtatttttatgaatgctggtgataccatgtcagccattaatatcgactatggtagtgctaaagttcgtgtatacgcggctaacaacgcggctcttgccgcaggagatgtcaaatacaacgaactttacggtacagcaaataaaccgtctaaggccgacgtagggcttggtaatctgacaaacgacattcaggttaaaaaagctggcgacaccatgactggtgatttagctgcacctaacctccatgcttctgggccgggaaccgcatcggtgtatgttaatgcaggaagcggaaatgctcatgtatggtttagaacaaacgccaatgaacgcggtgtaatttgggcaaatccaaatactacgaacttaggacaaattaacattcgtgcaaaaactactgaaggtgtttctgctggtgattttagcttccgttctgatggctgccttgatgttcctgtagcagttaaagttggtggagcagcaatactaaccaaagacgggaatattacctctggctcgatgtttggtggcaaccttaataactatctgaacaccattaaaaatgatatcactgctggcgataataagcaagtaagtaagactggtgacaccatgaccggtaacttaactattaacgctaacttaaaagtcgaaaaccctaatggatcaatggttgatttaggttcagagaactcagataagtacagcagattaacccttgctcgtaaagttggcgatggcgctgccgtagcaatgcttaaaattactcctgaaggatacgtgcaatttggttatcaaactgcggtttctaatccagctcctagtaaatatattctagttaaatctagcggccttgaggtagaaggggacttggtttttaaccagacatatcgtggtgctgaagacgcagttgatattactgataagactaatgaccttaacaacatggttattaaaggcagtgatttaggtactcgtctattatacaagtgtacttctactggtggtggttctaatatatcgaacaaacctacctctgacggcaactttgttcttgaagttctatctttgcgtaaaatttctgataccgattggacatgtaagcagacctttactacaaagaacggtgatgttgaaggcacatatgttcgatactgccaaaacggtacatggtctgcatggaaagaggttgttgctggtgttcaaccaattaatttaggtggtactggagcaacttctgtagctgctgctcgtaataacctcggtgttggtgaaggacagagcgttaagttcggcggattagttgttgatggaaacatcaacgttgcttctggtaattttgttattgcaggccaagctcctactgataactcgcatctgaccaacaagaaatatgttgatgataaggttgcttctgctattagtaatgctggcgacacgtatcttccgttagcaggtggtactgtaactgggcggttaacaattacaggcgatcagttaaagactacatcgctctgggttactggagatgctgctgttaacggtgttttaactgttgatggaagggctagatttaatcaagagttcattgtatcaacttcggttaacgtccagaacactggtaacagtcatttggtcttccgtaaagctgatggtacagaaaaaggacttatttgggctaatgaccctggtaacgttagtataagagcaggtggtggaagtggccctacttggaacttttgggaatcaggatcttgtcaattcccaggtgctattagtaactttaatggtgttaatagtattactaattaccctggcggcggtattggcgcgtatttaaatacagcgggcctaacaagtagatttagtaatggtgcttatgtttccttatacttccaagaatatgtaggaagctatcaccaagctattcttaatgttaacggctatgggcaagataacagcttttatttccgggctggtggtgatttcatatgtacccgtaatggttcattcgataacgtcgagattcgttctgaccgtagagccaaatcggatatcaaagttattgaaaatgctttggaaaaagtagaaaaactaaccggtaatacttatgagcttcacaacacatccggtggtactactcgttctgcgggtttaatcgcgcaggaagttcaagaagttcttccggaagcagttactcaggatattgaagcagacgggggtttattgcgtctgaattacaactcagtaattgcacttctcgttgaatctgttaaagagctttctgctgaggttaaagagcttaaatctcaactgaaataatgtaaggggcttcggccccttttaggagaaataactatggcagtaacagggccgtgggtcggaagttcggcaaaggctgaaactggcgaagcatggatggtgcaagctggggccaaattaagaatagggacaccgttttggatgtctaatatgattggacaaagcgtattccatttaattttcagaattaactatgcacaaggttcttctggcgatccatctagatatagaggattctttaaaagagggttatcagtaaatataggagactcagcaaaccagccaacattaaatgcatttcctggtggtgaagtagggtctttagtagccattacaaatattaaaggggatccttattgtttgtctattttaaatggggctgatcgacgagttaaagtgtctatatttaatgcatctggcggagaccagtatgatgtttatttcagtggaactactatgagtgacggttggagaagatatagatgcgaaaacgctggtggcctcaatgggtattttgaagctagaatgtataatcagttcggtgctttattagaatatgtttgatagataaaccaacaaactcacctcatactattaaatatattaaaaggctacctatatggtagcctttttgttgcatcctaaatatacctatagtaacctaagaagagtcttataaaatggctgagagaaatcccgtagataaactagccttatttgatctggtaatatcgtttgtgatgggtgtgaaaacatggaaacaattgctgataaaaataattctaataatggttatgtttcttatggtagtaacttggtacaaatggactgatatattcccgatgataaaaggtgccattgtagtcgatacaagggctatcgaaatggaaagaacagaaaagtttaatcaatccgcgttggaacagttgagcatagttcatcttacttccaacgcggatttttcggcggtactggcattcagaccaaagaacataaactattttgttgacattgtagaatatcagggaaaattaccatcccaaatcgatcctaaaaacctcggtggttatccgatcgataaaacatccgaagaatacacgaatcatataaatggcttgtactattcatcaactacagcaagttcctacctaccgacacgtgattttgtgccagtagcttatacttttagttgcccttatttcaatcttgataactactattctggatcggttttgatggaatggtatgcaaagcggcctgatataccagatatgaagataaacatcatatgtggacaggccgcgcgcattttaggtcgagcgaggtgattaacgtaatgctggtgttaaattgtgtgatcttccaatagcccgtttgattgctttaaagaagttcatcaccgggctatttttctcgtaaatatcccaaactttcaatttgtcccacggatccggaacataatcttcattccttgccgaaacccccaacgtaaccctcctgtatccagcgctgtcgtgataatacacgaagaatggcctacctattggcgcaaccttacaacctctcttagcggctctcatagcctcatcgaacgtcatggattcccccaaaaatttctatgcatgaatggtcgaattccgatagtttcactcaaaatgaatatcggatgatctagctcatcgtggttttcttcgtcaatgacgatatcccaatcagtagccttttgttcttctaccgtggcaatgaatacctggtttacttcacacttgcggtgtgtacgtctgatgattgtatccccctcacgaaacacaatcatatcaggattggtagtgcggtacgcggttttacccgcgcacacttcattaagcatatcttcgtatgtcattataaaacctttacacgttgaacgatggtttgtttaacgtctttgtattctccgtgctctttaacggttgctttgaaagtgatttcatcaccttcgtttgcaatgttattaccgaagtaaacaacaacattaccatcaacattaattttggtcatgaatctttctacagaagtgtagtaagaaacttgagtatatcccagtgaaatcactttctcaacggttccggtcatttccagacgttgtttgatttcaccgatgtggttagctttagaaatgcgttcctggcgctcttgttcccactgttcgcggatttcttcgcgtttggcgatataatccttttccagtgcaacacccatgcagtaagcgcacacagcatcgaatacagggctgtttttgttgtcttctttagactggtcagcccaccaaagaacagtaaacattggcatttctgcaattacttcgcctttacgcttgccaatcggcatgatccctttttccagcagttccagtttttcagtatcgaacactgacagtttaccgcgacgttcgaacagatcgaaatctgcaaagccctggaatatcattttgaaagtatcagtttcagttaaacgggctgaaacacggtcgaaatactcacgcgctttcgcttccgctttctccggatcggtagataagttgcagatatagttatcagaagtataaccgccgcctctacgctcaacacgcaaggtatacattgcatttttacgaccagaagaaatgaagtaagttgtagtaactacggttgcgttagtcatggtatttctccttaaaaggtatctcgtttcgatatggctaatatagcaaaagcccccgaccgaagtcaagggctttttaatcattcattcgaatctttcattgctttatgaagatgaatatcaaaaattttccagtacgcctttccgcgaggataaatttttgctttgtcaatatcgttgttgcttccccatgtattgtttgggccacgacagcgattttttatataatccgtatgccagaataagcgttgaaccgatgattccgtacctaatggatcttctttactgaacagaatttgtatactcataagaagaacccagtgcgaacaatcagatcgattttcttttctggttcaaacggtgatttgctatcgatgtcacactgatagaacataccaacatacttttcaggaatgttggattcacgcgcccatttcaggttatcatcggtattcggccccagcatgaggttaacaacatcaacagcataatcctgttctttggtgttgccggaaccgtttacataatgcccgtgggcggttttgaggatctcaattacttcgctatcgtcagtttcgactttgtaaagcgttgtattttcaggaatttcttcaagaatgatcaaagcggttttcatcacacttacctttgtgtttctgtttacgttttgcttctttaaatgctcgcttgcgatcgcggtgagtagaagcgcggttaatccatgcatgtttcgctaccaaattattcatataagccccttaaagaaaaatatttaggggctttcgcccctgtatcaatccagcagtttgcggatcttgtctgcgatacgtccggcacgggttgcgcttgcagtatgatcgctttcttttgaagccagttccgccagcttacgctgatgttcttcttctgctgcttggcgatctgctgcaacctgtgcaacctgctcattatcgtgagcaatacgcgcttccagttcagacagggttttgtcgaaagttgctacgatttcatctacagaacgaattttattaaacagtttcataatttatctcaattggttagttttaatcagtatacatcaatacggctggaattcaaaatcataaatgtcattcagtgcgcggttccactcggtgtagttttcaccagcaccataacgcatttgaatagcactttcgaacgttgatccgttgaggttcgggaaaccgaacaggtttttgattttgtcatgtgctacataatacagagaagcactttccagcatcgcaaccatcgcagacggttcgtgttcgcggcgcttgatacgtaacagagtacgactagcaccagttttacggcgttgatttggtgctacgtagaaacggaatactacgcgccctgttttatcatcaactaccaggtaaaacccgttttctttcagatccacgccttcgaatttcttgaaggttccgcgtttcatgtcaccaattttaattgcatatttgtgaatgtcaagtcttgtcagaattcttttcatattttttagataccagtttgcctaattttgtaatttcgcctgtttttacgttaacaaacaaggcgatgctcagaaatgggatgctaatcactacgctgatcaatgtaaacagaaaacgtatcacaaaaagaacagcacgttcaagatatcgttgcatccacgcgattcctaaacaactataccctactataaaggtggttgcaacataaaatgcaccaaatcctttacgaaatacgtaacctttcccggattctatccggtcgtcggcccacatttcacgggcagttttcagaatagattcaccactagcgcgagtttcgttagccgaaggcatgtttttaaatttcatgatagtctcctatgcgcccagaactctccaggcgcggttgtttagttagtaatggctaaaaccatatgtaacatcaatcatgactttataacggcatacacgcatttttgcgttattgtaatccactgggatcgctaccacgtcagcaggatccacctttacctgaatgactctaccaacaccgcccccgtagtgtggaaggtatgatttagccgcaacgtgtaggccagtagaacaggtgcgcgttttatcttcgtctaccatgtttcgaggcatggagacagtcacaccaggactattatcaaatttgccagtagcgagatctttatagttatcgcgcacacgtttccaggcaaggaaacaaccatcatcggtcagttcaatgtcattatgtacaaggaacccataaagctggtatacagcatcgcgtgaagggtttcgcatcaaccgttcaaagaagttcaccagatgttcatacggacgatcgttatacatttcgcgaatgattcgttgagtgatatcagaatcaaacactacatctttatatagaagctgatgaccaatgattttaatgttgcctttgctataggttcggatcgcttcttgagtatccaaacaagttacagcacctttgacatcaccagctttcagcatttcatgcgctttcttaaagttcggatgtgtttcacccgccatgaaaacgcgcccttcgtatacaaccgtaatgaacgattcagatccgatcatacgcggtacagtgtctgatactttaggcttttgttttacatcccttttcttagggaattccgctaacttgcggttgataacgcgcccaatggttcgggcgcttacgttgaactgttgggccagtgctgttttacttgcccccgtcaaccatccattatagatagctttctgttgtacttcgtcgagaattttgaccattatttccaccgtattaatttcttaaactcactgagattcttttcgttgttgtaaatcggacgaattgaataagaatcgctatgttcaacaagtgaagccagtaacgggtttagtgatttaaagatttcccatgcctgatcaacacgttttttcatattgctgcgtttaacgcgcattgatgctacggattcacgcagaatcggacaacgcaccctggaaagatttttaccatctttctcatacccttccagacacactatacgttcgagggtatcaacaatcttatacagtttttcattatatcggtttttcacaatccgatcaagcgatacaccgaaacggctatgcaatgcgtctgtttctgttgagtgatccttcccaatccatccaggcaagcaattatctttcaatgccttttcagatttaacatactgcttgcacagcatatcatcaaagcataccagatttgaatccgggatccacttccagaggctgttacgtatagcaaacacaacagggatcccagtatggcgcatgatacgcgataaagtagattctttcattgctgaatccatagacaacccggaattttcaccatctaagcggctatattcatcaataccatacaaccgaacacctggggctttatccagtgataaaaactctgattttatcataaacagagaagtttttgccagattgccgttactatccaactcataacgatatacggtcggggtttttgggcgcggttctgaatttttcggtgcatatagcgcttttgatttttcgcgatctgcatcatagatctctttttcttttgtcatttcactggtacggagatacacaatttccgattcatcaaaatgacctttccgaacgatatcattaacaatctcacgctttgaatcactatcgtaatatgcaacaaagctaacacggcttaggttatgcattttagcatacccgacgatatacggtttaaccgtgttggtatccacttttaacagaatgagtttcttctgtttccacggataataaatgcgtgtgatgtcctggcgtttggttgtttctggcttatacttgctccagcggcctccgctaccagttacctgataccatgcatctttaccgtcgtattcgttcgcccaatacccagcaacataatcatcattatatttgtttggtttgactagttcgctatggatccagccaatagaatcaccattgatgcgaaaattagcatctttaccaacaaagttttgtaccattgaaggcagagaatggaaccacgtcagtttatcacgcacggtttgtaacttatcgaattctgatttaactcgattgaaatatacccggctgatttgtttcagacgttctttaacaatccctactgtcattttatccatactcaactcttcgcgagaaggcatgaaatcaagttcaccgatcgggaagtcaataatatacgtatactggctttctgtatagcaatagaacatcgaggtatcatacaaatctttatccagaggataaatgatgttacccatgcgagcatatacaccgctagtgtatgctgatttatgacggatcaccccgctatcgttggttgcttctttcggctgatagttgattttgagaatagaagcaccaacaaagttaggacgaatatcagtaaatgattcgtatacccttgctgcttcgttttcccattctttgatatcttcaaccttaaccggaacagtgatagtaaccccgttaggttcatcgctttcaatctcatacagaggatcgcagaaaggttccccatcatccatatagattgtgtaaccgcatttgataccgtcttttacggattccaccgtgaaagcatcggaatagcaaagcggagatttgcaacccagacccatagaaccgatcaggtcgtttgaatcatttttagttgattcgaagtaaacggtaaacgcatcactaacgaaatcaggagacataccgatcccgtagtcacgaataacaaaacgaggatcaacagcagttggcaactggacatcaaacgggttctgatttcccgcttctttgtgtccatcgatcgcattacaagacagttcgcgaatgattgcgcggatcttgtatttgtatactgtcgaagaaaggatcttatacgctttcttgtttgcgcgtagagatagtttgtttcgtcccttgctggtatctgtaccaacacggtagatggtttgcggtgtatcttcgcgtaatttcattgtttatttctcacttaacattaaaaataacttggtcacaagagtacttcgttggctttttgttcagaccatattctactacttcgcaataagtgtcaaggaattttaccaatttttcttcctcgacctgctgtttcttcatatcaaggataccccacacgatagccccgataatgatagaaaagaacgcacaaaaaccgaatatggtcagatattttcccaatctaggcgcattataacgtgtcataccttacccctctttgcgaatgtatgcaagttcttcatgggttactggacggatatacagacggccttttgtatatgccttgcgcccgctgatccaaatgtttttcatatccttaacaccgttcatcacatcgttgtaaaacttcttatcagctttagcctgatagacttcacggccttgataatctttcatgaacaaacaataaaggatctcattcttatcaactagattagcatcctttgtagttgttttacttggtgaaggtttcgcacccaggcgcaaggccatagcttgccacactttaccatgttcataaccgcgcccgacaagagcatgagcgatttcgtgtaaaagagtgtctaaaatatcctcgtagatatcttccgcaacatgacgaccagacagttcgatcagttttttagcatagctgcaacggcccagagtttttgtaatacgtccattgatccggaatgtccaaccattactaatcaaaccgtgtttttccatcatggtacgcgcccagtgggttacttccattgcactacgagttttcaacattttagaatctcctttgcttggtacaaaaccaatatagcaaaaagccccctgcattgcaagaggctttgtaattatttcaacttcttagaaagttcttttaaatcattgagatactcaattttaggggttgtttcttcccagtatttcaactgtttacgcaactcttcggcttcatcttccagctttttgctttcgtccgtggttagatggtagatgttcatagccactaacatttcggcatgattctcgcaacctatccacgtagacacaaatttaaccgcttcgctgcgactaaggccacgcagagaatcaggagattctaccatttgagcaataaacgcaacctttgccagtgctttatctaacgcttccttagtctcctggatacgcttattgatgcgctgttgatatacattcatacggatatcaacaaaatcctttagaagcgtttcagggcgttcgtatgagtatagtttaccctcaaagataacgttaatgtttgggtttgagttttcaatcaaaccgaaatctttcaggatcttttcacgggttaacccattagcatactctcgcttgagcgttacttcataccgaaaatcttctttcgatagatccttgtagctaacgataacgcctttttcttccagcttgtcaaggattgcaatgtatttcacacggtcatatttcactgggatctcagtgatcaccaatttggttttaccttgcaattcataggtgccgtaaatcgtaccgtctgtgatttcacctttaaagtaaggatatttcagatccagtgtgaaatctttatcattcagatatgcaatacacccgttaacaactgatttaggatcatgaggcggaatgtttgttgcatatgcttttgcaatcccgctaaacccgttaaccagtaccatcggaatgatcgggagatagtacgctggcggtacatgttccggatcttcatgaactggcgttaaatcaccatccatataaattgctttgaatattggcgatagtttacacttgatgtaacgaggtgcgccaggtttcttaaccaaacgggaaccaaagaacccatcacggtcgaataacggaatgttattgcaccagtgcgccgccataagggataacgcttcttctacagaggtttccccgtggtgatacccatacatagcaacaccgccagcgatagaagctactttctgaaatcccgttccgccctgcatagcagagtgaataaagaaacggtgaacgggtttaaacccgtctaccaggtgcgggatcgcacgtgaataaatcgtgtaaagggcaaacgttagcccttccacctgtacaacatctttaatacttctttccattagtcaaccttagaaaatttgtgttttccattaacccaatctttacgcggatcagattcgtcgccgaagcatagttctaacacttctttgtattcgtcgtcaagtacaatgacatcatacttcaactgatcacccagaacacggtcgtaatcttctttgcgtaaagaacccagccccttgatatatcgtacatcttttgctttatcgcggaacggtgcaaactcatcaagagaatagaaccatttttcctcgcgcccaactttagcgataacgatcggggttcgaatatatcggatccgtttctcagtgaacaaagaaggccaacggctaaagaatgcaagcaacagagttaaaatgtcaccaccgtcaacgtcagcatcgaccatgatgccgatattatcataagtcattccggaagtatcaccaggatgaatattgaggatagccattagctcaaacagttctttgtttttgataatgtctgtaaaactcataccccatgtattcagaggcttaccacgtagcgggaaagcgccttgtgtttcttcgttacggcattcgatgaactgaccaacagcggaatcaccttctgtcagaaacaatgttgtttctacccctggagtatcgataccggaagccggaacgtgtttagcaatctttgcctttttcgctttctttttcgctttggtgatcgcggcggcttctgctgcttgtttacgaatcaatgcggattcaatgatcggagtaatgatttctggagtatccataatcatttttgcgatctttttgtaattcaaattcgcatgattgttaaactcacctgctgtatttgccaatcgctcttttgtttggctatcgaatgcaggtgcattaaagttatgcaggaataccacaagagttaagcattcttttacacgtgctttcgggatctcgatactatgctttttcttgatcatcggttcaagttcagaatagataccatcgatcatacactcaacatgaacaccgccatttttcgtatccagaccgttaacaaaggatttctgtttaaacccgtcctcagtgctcgccagaatgaagctgaggcgattatttgtctggacaatggttttatccccatacatggaagcgtacagcgggaagcgattagagagcgtttcgccgttatatgtgaatttcacggacgggaaagcaacggcaagggccattaagcgatccttaatcacttctttggtttcttcatcgataccagttacaccaaacatagagaagtctggagtaaacttaacagtagtaccctgttctttactggggctggttcggtaatcgatgttctgtgcgccgtccgtacagttaatggttactttgcgtttcccgtttgcagtctcgccaataaaaatcgagctataacagtttgtcaggaaagaaccaacaccattcatacccatcgttacgcggtttttatcatcgaagttagaacccgattttgccatagtccatgccgcaactggtttaggaactattttcccatctggggtttttacatcatcctggggaataccgcgcccgttatcagagattttaaccagattatgatcaatggttacatcaatcttattagcatgtttgaattcagttcggatcgcttcatcaatcgagttatcaaggatttcgttgatgattttaaccaacccttccacgtactcaaccttgcgatattggcccattatgaaacgttcatgcgcttctttgttaaccgatccgacgtacatatttggacgcaaccgaatatgatcgcgatcgctcatacaaaatgattcgtcaacctttgcgccttttttggctggttgtggtttctgttctggttcatcatctgccagaagaaaatctaaactcatattcacctctttgtttaatcactgacattatatagggttctatgaaaaagaaaacccctttcggggtttacttgttataagggaaaccatcacgaaccatttgaggtttatcaaccgttcgttttgcttcgcctccgcaatcacaatctttcggtgcatcacgggtagcaatgcttgccatttttggaaattctttattacacttggtgcatttataggtataggtaggcattaataaatctcttttaaactcaacatcttaactaaacgggctttgtctatgtcaaaaacacattgacgtgcgcccggatacaacttttcaacttcgtataccatgcagacgaaaccaacattgtgcatgtactcgcgttcatatgcattgaaccaacgagaaaggcgctgtattgactgaaacccaaaatataacccagccgcttgaaagtctatgttatctttttcaaggttgcgcatcaatcgattatcgtcatccggcgctggatgtcggtgatcatccatatcaatatagatatcaggattcatacagaattgatcaagccattcagcggtatccatcgacaaataacgattgacatatgggccactttttgtttgccatttttctgtacaatcattccagaaagaacaagaaaattccacacgatatacgaacatgatataatcctcacaagtaaactcaaggtttacaagtacgataccacttatctaatttttctgcaagcatttcgttgataatttttgcaatttcgtaccgtccgtgagtagtacccagttccaggtaaatcacatcaagtgcgcacacaatcgcatcaatactttcttcaacgatattaccgccgcgttgaggctgaatgagacattcgctgatctcgccaacttccgctgataggtgatgaaccacatcactcttcgtgcgtttcttcactttatgtgcaatttcgaaaaacttatcaagtacgatcgtcgtttcttctcgcgttgcggtattctcggatgttgaagccgtgtgttgaacaacatatttcgtaaaatagccttcaaacacgttgaaagggatcacatgaggaacaccattcaaaaacaccccttctttacaaacataatggatttggcgcggaatagacaaaccgccgctgcgttccaaatgccgtttaacgcttgctacaaaatcaaattctttcccgtatccatccaatctactgttataagtgagtagaccaaaagtaggaacatatagatcattttctttatacagattcatttacaatacctttatggtagccaaaaatataacaatcaatcgaaggacgttcaccagggaagtgaatgcattgcatgatgcgttcagccattagatcttctcccatgtataccgaagtagtttcttcgttgtaatgggtatcatacgacgttttaagcgtcatgcccggaagccctgcaatgtgcatgaatttagaattggtgcaaggttttcctacttcaccgttaaccatcaacactgcattagttttacgtgcttttctcatttgaatttcaccccgatttgagatacgttccattcttttacgtcatcaacaatatcataatggttgatgtatggtaaagcaatttttaaattactcgcgtcttgaatgttgcgtaagaaacgagtaggagaaagaagacacaacctctcggatccgttgtttcctttagcggcaaatgatagggtttctcccccgtcaatcttcatatcaacagaaatcgttttgaattctggtgcgtatgacgtgattttgccgttgtctctcggtgtactatagaaacatacactttgtgggacattataacggtctgtttcaatgtacatgtaatcgccgtcagacattccccacacggtgtagagggatccggtatagtcaccaaaggaatttttaaaatcttccttcgtggtgtatcccagagagcgcaattgcataagctggttatgctgttcgattgcatcggctttttgttgttcctgtacttgcgcatcaatcgtttcttgccaggaattatacgcatagtaacccacaacagcgattacagccataacccctacagctttccagattttagagtcttcgtttttgttactcatgctatattccttttaagaaaaagggccgaagcccctttgttaacgaagataaaccacataaccgctttggtcaatcgcgcggtctgcgtcattgaagatattaccacgaatgccttttgctggtgctttccagcttgcaggtttcaggatattaccatcattatcgatgaaagcggcaacagaacgctgattgaacatttcaccagtttctttgttgcgagtatcctgaacaacgcgatgatatttgcggcctttctccagaaagaaaacagtttcgaaaggagaatcttggaaacgagcgttacgcgctttgtacattgcttccatgaaaggggctgctttttctgcgaggatttcgaaagtgttcatggtatatctcctaaagtgtgtttcgtttcgatgtaagtactatatcaaagatggttattctatgcaaggcttttttcgttatccatcaaatattttaagtgttcttttaatgcagggagttcgttcaaatggcgttgcttaactttcttgtactctttgcgttcccagttttcaagattgcttgccaacgcttcatcacaataagcgatcccgcgttctgcatcctgaactttccgtttccattgtgcaactgcttgttgataaagagaaccgttaaccatcataataatttcctcccttgtttcgatggggtaactataccaaagctaccccagaatgttttaacaaaaagtgctattagtaggtatccagtttatacattttgcaccagttcatgaattcttcgaaagtctgagtattaacacgtttttccttcttcactttcttagtgattacaggacggttagtaaaacgtttttgcattttcacagtgattgctactttatcgcccaggtcttcaaccttttcaaccagcgcccactgagaaccaatttcagcgccgaaagtcaaaccaacaatctcacctgctttaacgtgtgctgcatattttactttaaccattttcgtattcctttctctgtttcgtttcgatgaatacaagataccaaaaagcctcccgcaatgcaagaggcttctttaacaaaaaatgctattttatttctttgagtaatttacggatcccgccgccctgtgtcttatcaaagattttctttgcatcaataacagaagtgattatgtggtagttgttaccttttccgtcaaactcaaactcgaccttgtagtcactacgaaatttcacaaaaacaaattcacctgcaaagtgcttacggaactgtttttcgttaatgtccaaccattcctgtgtatcatctaactgatacatgcgacaaaacaggatcgaacccattacaacaatcatgacaaggatagctaacgcgaattctgacatcatttacccctgtttactgattgacggtgtaacgatttaggcacaaccggatttcgatacggtttgactttatggatcatgggttcttcctcaaccaaattaggaaattggttgttccattccatcgaaaacggataaggttgtgacttgaactcttcgatcacacagtttactaaacggtcgccgattacacccaaagccgccccaataatcgctatacgcataaatcaccccttaattgtgtcaagtacagtaaaccagtcatgaagccatatcgttgttcttaccgcgatatacgttaacaaactaatcaatgataccgctccgcaaatagccagcgtaatcaacagccggatttcaaatttagtaaaattcatatcaatctcctttcttagaacccaatataacaaaagccctcaaccgaagtcaagggctttgttttaaatttttaccagttttggtaatcgaagaactataccaggatggatcagacgtgcatccggaatagcatcacggttgattttagcgatatcaggccaaagttcaccaacaccatacagtttctttgctatagaatataggctatcgcctggttgcacgacatagcgatcagattcaatcttaaccagatcctggttaatgatatcatcaaaggcttttgctttcgcttcgttaatcgtgttcccgtagtaatggcgatccataatagttaatgtgatcatcgtttctttcctatgctgttttcgtctgtctcttctaaggatggaggttcttccagccccagggcataacgtttagcatagattagcatcaatgcatctttagcgcaatcatgaatcgaatcatgctgaatgaatccatctaacatgcctttacgcagtggacacgtggtcactccgcgagtcagtaaacggttttcaatagctgtacgcacatcacggctattccagaacacggtcggcatatcttcaaacgtgtcaagtttccctgtcatagttcgtacaacatcggttagcatagaacgatcgaattcagggccgcgcgtataatcgtatgactgccaacgactcacaccgtcagccgctaaatcagcaaagaattgtcgatgaccttcgtacaaatccatgtcgatatcggaagggaacaaaaccctttgcgcttctttagattgctgtttccaccattcgatcgttttttcatctttgatgcgttctggttgtttccggatgtcaaatttgtactttcttcctttagcaatcagttcctgaaaggtaggcggatcataaggatcatcaacaaaaggaacatagctaagttcagctagttttccttttggaaacgggccaatactttcataatcaaatacgaaatctacgggtaaatgactcattcgcgaccccgcttatacgattccatgaaataggccaatgatagcgcgacttccggagtaacatcaacggattcgatcatgcctggagttaccgccatcataccgaactgacgaagcccacaacgagcaatcgatttttccagtcggatcatgttttctacagcctctgcaaaattgtccagatgttcccaatcgtggtaatcttccattgtagaccgatcacttttcaaaatcagatcggcaactaattcagcataaaggcgcggaaggtgaatattcatttaaaatccctcaagcatgtgtttgttttcacgaatgttacgacccattttcaaagtatcaatgatcactgcatactcttcaaaagtgaattcgatatcttgtgaaatgtttccccacgtgtaggtcggcccgttaggacagtataacccaacttctttgtttgcgttgacaacgcagcgcaattttgcaaacaacaaattgatatcgatagaattgaacccttcgagataatcaagcccctctctaccaatacggtcaacttctcgcaaaatcttttctacatctttgactttaacaataattttcataataacctcaaagggccgaagcccttagacataatcaacagtgaatcgtgcgcgggtagttcctacataaagcaactgcttacacaattcataatcggcgtatgcgtatgcatcgcgcgtatacatgtatgaatgatcatacgtgcttccctggcctttgtgatacgtacaaaccggaagtgccttaaccgtctggaacttgtttttgatttgccagaacgaataccagggggctttgtatccagtttcctgtttcatcttcttatactgaaacgcgacgtagttcaaataatcgcctaaacgttcctgcataaccggatccgcaataacctgaatatccgctttcgtatcctcgaacatcgattctgttttcatcaagaaataatcgatttgtaccggatcgcatcggtcagctttgatagtatcagaacgcggtatgatttcaaggattttaatttgctcgttgttgttatagataacttcaacaaacgaaaccccattcacacggccttctgtcactaacggttcttgcatcacaaccacttcaccaacaatgaacggctgatcagttttgtacaagtgtttgcggatcactgcgtttaacttgtctacgtttgcgttagtgtaagcaaacatacggttattattcaggtcatccggagtcttaacacggctaaaataacgtctcaggaagtcactagcgttttcgtgcttcattacccctagttcaccattcatgaggggcattaacggcttaccgtcgcgtatagcgcgtgatacctggatgattgggtttccttctgcctgacgcataatcttatccatgcgaatgacatcaaaaatttcctcatcaaagaacggtgaaagctcggtgatcccttctgtattaaccggacggatctgatccttatcacccaatcccaggatcaccgcacaactcggaatagtacgcttgatgatacggaatagttctttgtcaaccatcgatacttcttcaaccacaaacacacgacattcagacagatcagcggcttttttgcctttttgctgttcaaatactcgtaactcttcgttggttacggggctgattttcagtgctgagtgaatggtcgttgcatccatacccaccgcctcagagagaacgtttttagcctggtgcgtcggtgctgtcaaccagatcccactaatacccagttttttcaatgtttcaaacacaaattttaccagagtagttttaccaacacccggcccacctgtgatagtagtatggattttgtttctgatatttttaatcactcgatcatgtgcatttttctggtcttcgctcagatcgtcaaaagttaattcgctcatactttaatcaataccccttgaatacttgcgtgttcaataaaccaacgcatatctttctttttcttttcggttacggtttcaacttcttcctttcgaaagaatcggctaagaccactttgtttaactggattcatcttatcatgatattctttgataatcgaatttttatactcgttagcatcgtccggagatagaaacaacaaaggtgttaactctccttccttaatgaagggaattttaaacccgtctttatccttactaacgacgatataatattttgtaatcattctcgcccctcataacaaacgtagaatattccaacaaaccaaaacactgatagtataatcagtaaaagttttctttcaacgccatttacgtgaaacacacaccaaccgaaaagatatgtgatcatcgcgcaaacaccataagaaagaaccccaacagctactagcgcgatgatcggatccattagtagttgttagcccaacggcggaggttttcggcttgtttaagagcgtacatcttataaattgtttctgcatccatacccaatgcaataaacttacatagtacaaagtggaattggtcgatcatttcaaacagaacttctaaacgatcctcttcactcagatccgcaaatttagtattgcgcaattcctggtgatttgctttccacggtttccaaacaccggatgcaggtttaacaccgcgagacattccacccagagcggtgtaaagttcgcgggtttcgtctgcgatcgcgtcatcttgcagtttcagccaatcaaggatttctccgcaagtttccagattatctggacgcggaacccaatgcagcgtatcagacaggatttgttgtgcatggttttgtaaatccagcatggattgtaaaggatcgccattacgggccagaaccttttgatattcggaatctacaaattccagatcttccgggttaaccaggtgcgcacatgaattaaatacaggagttttatcagtagtcatatcaatctcattttttcggtgatttgtcccacgacttaaatcgaagttttgccgtgagtccagaaacagtattatctttcaaatactgcataatttcaagtttagttgcgccgtccgtttttatcatttcgttgatatctttggaaggccacgggcatttatcccacattacaaccttttctccagcctcaatcaatttaaagaggcggtgagtagtatccggatgacgtgcttcattgtcaagaacccagacacgcatatttttgtacggaacctcagaaagcgcaagctgtccaccagtgatagcgccagcattatcaacaaataggctatctaatggcccctcaagaagataaaccgtttttaacggatctatcgtatcctgtccgtaaatcttggttgattcctcacaggctttgattgtgatatatttcgactttgcaccgtcacgtaaagcacggccctggaaagattctattttacctttcttatcgaagatagggatcactaatctcggttctggttttgcgatcggataggtatccggattcaccgtattaaccagttgttgccattcgcgagtaaaccacaaccgatcccacttgtcacgggggatacaacgattctgcacatattttatgatcggatgttcatccggcaaggtatctaacctttcgcagaattgaagagtaggaataaatttcttctcttccttcggttgttctgtatgcgttggctttaacgaattgcgatccttaaacgattccatgagataatcacggtaatcgtctggataatattctttcaggaatacgctaaacggtacaccataaccacagttaaaacaaccacaattcatatgatcaccctttttagaagggtagatccaaaatcgttttttgtacttgtctttcattgagtcgccgcaaataggacaacgcgcattgatgcttaatgcccccgatttacgaacgatttcgctttgaggcaatgatcccatgattcgggttgcaaattctatatcaagatacatttcttacctcagttgactatctttagatcctcgtcgattataccccgcgctgatcatttcgtcatgttctttttggcattcaatacaataacggcaacccttcacgatagccctacgtttttcgggtatcggatccccacaatcaaaacaatgcgttaatgattctccgtttctgatttgagaacgtgcaaaatctatcgcattgtctattgttgcctgaatggtatcttgaacaccgtcagcagggccaaatccaaccgccattgtaaatcctcctaatcaaatgatttcaatatcatagactaagaggatttttctgtcaagaacttacttgcttttctgttccgtcaagcattaacttccaaccacgaaacgcctgtttaaacgaataatttattgcaatatcaattttatcagaaccttttcgacgattctgataaacggtcgcgttgtcactcatatacatgatacaaattggaaaccatgtataatcgttagcagtagcccagatagtgatattcagcggaggaattatcatttctttttccttttccctgcacgggtaacgcccaatactttcggcccgatgttggttactgctccagtagtcacaccagaagcaatcttttctgtatcgccgccagaatcacccgcgaccatatcctctaacatgcgccccttatcataatattctttgaggcgtggaacgttcaacatgatttcttcatgctcttgttctgtcagattgtagcgattgcgtagggtatcatatgaactggttaagttcataaacccactcatatacggaacagcattcattctacgcttgatatggcgtactgaacgatgaaaaggagaatacgcttctaactcttcttttgttttggggttgcgaattacttcgccttgtccatcaaggatccccagtttataagcagaccactctgtgaatggttttttgagtagccggatcatccggacgctatatgttaaatccatatttttaactaattgatcactcatgattattactctattgtgaaagtgaataaatcagatttggtttcaggttcaaactccatacaaacaacctcgcatagtggtttaacccctttccaatcctccaggtaatacccagtatctataccgcatccaggattcataacaaggccagtttcatcaagaaactttttgcatttacttgatgtggtgctgtcatcttgtcggaaacagtgtgttttcgaataccggaaatttgcagacatttgagggattatgaaagttccctgacgcgcgatctgtgatgcacgttcgattactttatactcaaattctgcccctgtatacttacccttaaaatcagaggttttgattttaccaaaaggcgggttactgatcgccatatcaaacacctgattaaattcagttgttaaggcgtctccatgcacccaggaggcttctggtacgatacgcttacctaactcatagtatgtgtgatttaactcaacacagacgatttcgcgcggcgtattgtacatcatgtaatgaaccatagcgaaagataacccaccgataccagcacacaggtcaataacacttccacctgtgcaagcatcgattgtgaaatcgcgagcaagtccaataggggtaaagaacgcccctaattcagaattgtttgtaaacgcgccttcatgaaagttttcaataatgaacaacttctcttcgtaagttagcgctttgtcagagtgaaccagatccattatctgattgtgtttcttagtctcttgctttgtcaattttgccattaacatcaccaaaattca

SEQ ID NO: 28 - DNA, 76901 bp, unidentified
  source 1..76901: mol_type = genomic DNA
atgcaggcgatgctaactctcgtgctgaactgggccaggatgacgtcctgtcttacagtaacttcatgaagctggctatggctctggataaggctgatacgccgaagaaaaccaccatcctgtcgggtactcgtaatatcgatactcgtgtaatcccagctgctcgctatctgttctgtggccctgaactgcgtcctaccctggaagcaatgaagaacctgcatgatcagccagcattcatctctgctgaacattatgctgcgggtacttccctggctaatggtgaagtgggttcagtaggtcagttccgtctgatcgaaaaccagaagatgatgaagtggtctggtggtggcgctaccctggctagtggtgacgattctgtctactacaacgatggcacgaaatacgatgtattccctctgctgtgtgttggtgacgactccttctctaccatcacgttccagacctctggtaaccgtgtgaagttcgagatcaacagccgcaaaccaggtgacaatgttgaccgtactgacccgtatggtgaaactggcttcatttctatgcgctggttctacggcttcatggctcaacgtccagagcgtatcggtctgattctgaccactgctaagatgtaatactggtttattaaatcagtttgcattaagcttaagaccggggaattttccccggttttttattaactaaaggtaggtgttatatgtcacagtactctgaacaagatcgtgaaatgctcgaagcccaggctaaccaacttggtgttgaattccaccctaacattggtattgaaaaactggctgcacgagtacaagaagctatgtcttctatggaacctaaagagaaagaacgccctgctaaaggggaaaccaaagaacaacgtcgccaacgcaagcataaagaagctatggctctggttcgttgtctcatcgtctgtaatgacccaaataaacgtgagtggcctggtgaatggttgggcgtatccaatggtgctggtgtccagattcgtaaactggttccgtataaccaacctgataaaccattccacttacctcgtatcatggtaaacatgctgcgagaaaaacaggttcagatctttacttctaaacctggtaaatatggcactactattcgagtgtctaaatctattccagcttataccattactgagctgcctccactgacccaagcagagctggatgaactggcgcttagccagctgcaacgtggtgctctggacgactaaggataaaccatgactaacattaccattgatacagtagtagcccctgatctggatatcacagatcttactactattgatcttaaaggtactggtgtctgggataagttgctgcaaacaatgcgtgttcaacttgatgaacagtttagtaagaaccgcattactgggcctacctatgggcagacctatgcagcaacttatgattccaccctgcaagctgctatctcgtttttgttagccaaagaacgtcaggctttggagtttaagcagcttgaattgcagggtgatcttacccaagctcagattgaccagatccacgatcagatgcagaaaacgccgtatgagattgagcagatccaggctcagacggctaacatcaccaaagatactgagcttaaagactatcaactgacttccctgtacccagcacagctggcacaagccaataaacaaattgagctattggaagcccagattgatgttcagagagaacagcttgccctcttaagtgagcaggtagaacaagctaaggcacagactgaatactatgctcagaaaactattactgaaaaagctcagactgactcaactgtcattggttctggttctgttatcgatgttcaagtcgaactgatgaatgcacagaaagacgggtataaacgtaatgctgaacagcaagctgctcagattatgtcgaacacctggaacgtgcgtagacagactgacgaggatacctcagccaacagtactaacctgctggatgatgctacggtaggtaaagctatccagaaactcttagcaggtattgatgtaactgttaccccttcataagggtctgatatatcataaagggagcctagtgctcccttcttttttatgaggtcaccatgggactttttagcggcaagaaaaagacatacagggatttttcatactcccgattaataaatgatgactacttacctgatgtaattgggcaagccattactacctatgtgttggatacagataacaccaagtcactaactgaactgatgctggaatatgggtggtctgctaacaatgttaagtgggatgctgcttatcgttgggcagcaaaaggtaagtacacttatggtttaccctccgtatctacagtagctgttactgacttcactggggcagagtccttaaatgatgttctggtttctcttacaggacagtcagatctgacctatgtttacagccaatttgtgcctggcaatttcagacatgccatgtggcaacagctaatttccactcaagggtataatccaacctctaatgagttatctacccaatcctcagctttgggtactgcttgttatctccataacgctattaactttatcacccctgaaaccagtgaaagagctgaagatgttatgttccagcactggggatactcacctcagagtggttacacacctacaagagtgcaggacttaaccagagcagatacaccagatgaggttagctctactggttccaactatattcgtgttgagtatgcttttagctttgctggtgttaagcgaattactaccgtagaaaccactaaggtaactaccactgttcgtactcccaatggatcaggtgggtacgatgatgtagttactgaagaatcctcagataccaccagcaatactacagactggaatgggtttaccatgccatctgatgtgattagctcagtggatgtgggaacgtctaccaatgagactgatgagactgaccctactcaaaccactgaaactactgatcctgatacgggtgtaatcactattgtagccactgaagtgtttcgacatatcacaactaatacagtcaatgttaatgtagttgctttttttaatactggttttggggtttatgactacaacccggcagatgaagacattgatacagatactgtacttgatgatagtgactcaggtaactatgaccctaatgctgtgttagatcctagtggggaagataccgatgataatcctgactattttatggtttcttatcagtggattgatggctctactacccatattgggtacttcacttatcagtatggttcaggttcttaccctgatctggatggcatcacaggcacgacagtagccgattttggtcaacatttcccccgtatctactacagacttgggggtaagcgtttaatctctgatgactaccaggatacggaagcctataaaacttctgttaaaatttgcaaaaagttagggcttgactggcttgaagttggcgatcagatttatgaaagtctcagctcgctaagtaaagtcagggatgtgcttttaatcctgcaagtacctgctaatactgaaaacgccctagagcaggagtacctttttaattacttctacactctctgtaatgtacggcctgagtatacagaggctatgtgggacaacacaggaaatactgggggatctgaggatgtgcccgcttcagacttagacacctatgagatgcatcttggtgctatggttaaatctgaagatactgatattgctacttacaacaatatggacttacttggctatgccaagatcacaggttctattggccctaaaggtagtgttacttctggttatgcagaagatggtgtgatccccactaaaaattctgatggtacttatggcactaagtccatgacctaccatttctacaaactccagacctcagatactgagtacgaagaggtaagggtatatgagttaactcatagcgttcgtgtgggcggtagcaagataacccgaggccatgagcatgatcagctgatggttcctttggatcatgcattcagaaagttgttttctgctcatgaccgtgaaactttgtatgctcgtgctttgcaaatactgatctgtactgagtacacagttaaaaccaaatggtatcaaactggcttgttccaggcagtaactgttgtagtagctgtagctgtgtcctggtggacaggtggtgcttcattatctcttattggtgctctgactgctgtagctacagccgcaggtacaatggtggccttctcactactcagtaagtatgtcttcagtaagcttggtagctgggcttctatactggctactgtggttgctgtagttgctgctgtgtatggtggttatgtttatttttcaggcactacagggccattcagcttaactgctaaaaacctgatgcagatttctaacattgcatttaaagcctctgatgcttccatgaagggacagcaaatagctatgcagcagaaactgggatctcttcagaaagagttggaagaaaaacaggaagtactccagcaagctcaagatgagttaaaccagggttctaatactatttctgactggatattccttcaggctacaagtggctatgttaacttaggcgaaacagctgatcagatgatagcccgaactctgaatacaaacattggggcactggctttacagttacctgatatgtacctgagtcaggcattgtctttaccctcgtctgtagagatcatgcagtttatgcaacaaaaactgtatactgttccagacgacgaacttaatccacttatgtgaggtgactaatggctggattatcgatgtatccaagtctgtgggatcaggggtcagtaaccccatccctggattcgttgagtactggttttaccaactcagcaaacacttttaacaatacggcccttactggctcaggtggttcaggtagtttcctggatagcattctggggggtgctggtgacatgtctggtttgcagatgggccagcttggtctgggtggtgtaaccagcttgcttaatggttaccttggcttccagaatctgagtctcgccaagaagcaataccagtctcagcttgatcagtttaacaaacaatgggatgccaataagaagttaaccaatgcttctctggcagaccgtcaagctgctcgtgttgcaagtaatcctaatgcatatcagtctgttgatgactatatgaaaaaatatgggatctaaaccatggctattagactgcaacaaattgctgcacctaactttgctggttctaaccaattactgctggcagcaaaccagcagattggtaatgctctccaggggctgcaaggcactctggggcagtatcgtgacgaggtagtacgccgtaatacagctcaggctgtaggactgcttactggggctacagatgctaatgatctggcccaacgccaacagcaagtagcacagttggttcagcaaggggacattgatcccactcgtgtatctgaagtggcagcaaccatgccggatactttgttaggtcgtcagactaatcagctaaagctaaaccagattcagactgcacagcatgatgccccattaatgggcgcttatatgcaagctgttatgtcaggggatcagaatgcagcaaaaggtattttgtcacaattccaggggaatgcttcagatgctctgaagtttgcttctgattgggatattaaaaaccaacagctgggtattcaacgatctgaactggcacagcgtcaggcacagtttaatgcctcacaggcagcagctagggcaagggcaagccaaagtaatgcattgctcaaagcattacctggtttacttaatacaggtaatgttctgcaaggtaaggttcaagctagggatttacaggctaatgctgaagatgctaaacagcgtctggcaatggatcctgttaataaccctaagcttgatattgctggatgggctgatgccaataacgatgcctggtttggtaaaggcacttctaactatatttataatgctctcaaggatcagcctgcttttaaagcactgaaccctcaagagcagaaaaatgtactggatggtgcccttgctaatgagtctaatcgtcctggtgatgtatcgctgaagaactatgcaaccaagtatttgactgatacgacttctcgtttaaataacctgaagattaactcacgtcaggcactggatgctcaagatcagcaatctgtaatgcaagctcaaagagatcgcctaaataacctgcttctgcccttacttttacagcagtaatgaggttacaatctgggtactccacaatactaaggaatactcagatggctggtgaaaattcatcccctctggacaagtttcttgtcccacaacaggtaacaggtcaggaagctgctcaggcacttcctgcacctactcaaccaactatcgcccaacgtgtgaatgatgcttctactcgtatcctgaataacctcacaggacagggtatgtatccaaccgaagaaggcgaaattgctcgactcaaacgaatcaataatgaacagtcagcattagctaaacaggtatctactcaggattcagattttggttggtcttctaccaatatgctggatgctaatacttccccattgactgatcgagcagcttctaccatggctaaccttggtaagggttttgttgatgcagttaatggtcttgcaggtaaaacagataagacttttaaaacacttggtaatgttctggatcaggcttctatccctaatgatgcactggatgcttatcgtcgtgttcaggctggtaaaggcactgaagctgataatgccctgttagatcgtcagggtgcctggtggacacagcctatcgaagtaaatcagttcggtgtaccagagatgggtaaccagactctgcgtcaacgcctggatgctatcaacgaacgtcagaaaacccaaaaccagagtagttatgacaatcttgaaaaattggctaaccctactcagatgcagcgagctgctgctgatattgagaaatcaatcgagggtaaatcagggcttgataaatttgctgctggtttagctgctattgctcgtaaccctggtgctgctgctcagactatggttgagtctgccccttatatggttggtggtgtcccaggtatgattgcttcctctgctatgcagggtggctcagtattatctcagtatctagatacccaacgtaaagcttccaatgggcagatcccaacagctaaagatgtagctattggtactggtttgggtgttgttgatggtgccctgaactttgcagagagtgtcattaaccgtactgctatgatcccaggatctaaagtattacctgctggggttgctgatcgtctggtgaacgcagcacagcgcatcgcaccacgcagctctacggctgctgctgctcttgcgcgtgtggctgctcctaccgttgaccttgctaagaacgccttaactgaaggtctggtatctggtgctcaaaaccagattgaggagaactatgcgaagggtaaaaacgaatgggataccaaaggtaatgatgttgctttcttccaggggattgctgctgctactggttttggtgctcctcgtgctgcacttagtactgctggtgaggtagccaatactgctgctcaggctatgcagaaacgtactgaagctcaggatccagtgggtcaagctgctcgtaataccaccccagaagatttaatgaatcctcagtcagaagggtacaacccagctgctgcaattcgtcgtgctggcatggagtggactcgtaacactgatgctaccactgatgaacagaaggctgagattcaatctcaggctcaatcagctatggatgctgctcagaatgatcaccagaataacctggatatgattaatcagcgtgctactgctgaacgtactcttgctgatgctggtaaatttattcctgctattcaggaaagactggatcaacttagtactgatcctaatgcagatcctgatgctgttaaccagttacagactatcctggctcaacagactgaagctcgtgatgctgcacaacaacaactggatgctatgccttctcaggaggaactggcacagtctgctactcgttctgctgaagtactggatcaggctaagtctgagtttggtaagttctcttctgctactggtatgaataccaatacagctaaaccagagaacccaacagcttctgatattatcagtcacccaatgtcttataccaatgaagacctgcaagagtttgtgcgtaatgctcctgctaatgctactcctgctgaactgggtacacttcgtgcattagctgatgccaaagttgcagagaatgctgttaagactggttctaaggttaatagtgagatcttcaaatccacttctaataacctgtcactgggtgattaccaacagggtatcaacactgctgtacaggctggtgatactaaccgtatccagtccctgatgactggtatcaataactttgaaacttcccatactgctaaagcagatattgctcaacagtacctgaatgaagctaaacagaatggtaagtcttaccagatcctgaaaacttctaatggatgggagttgaatactggcaaacgtctggatgctaaagcacaggctaagaatggtggctttactatccacaaaggctctactggtctggttaacaatatcgttaatgaagccaaggctatcacagccactcgtcagtatatggaaggtattgctaccccatctactaaccagaatgtgactggctcgactgagcaagtagcaaacccggaggcgcagccagagggtgcagctactatagcaggagagacaggagcacaagaacaacaagcacaaccaacaatcagcccactgaccacacgagatattcgtgcaatggatcaggcaacgctggaaaaggttatggctactactcaacaggctatgtcttctgactctaaccctgtgctggctcgtaacctggatgcacttgatcgtgagtggactcgccgtgctgatgtggctactaaccagaatcgtggtgttgatgctcctcaccgtaaactggatgactcctttaagcctaaagctcaggaaaatgagatccaacgttcacaggctgagactgctactcaaactgagaatgctcaggctgacattgataatgagtctactggttcagagtctcaacagactgccccagttaacgtagatgatgttgttaccaacactgataccctgactgagactcagcaagacaatgtagccaatggtgctctgagtatctttggtaaagttggtgagtctctgaaagctctgcgtgagaaagctttggctgaacctaaaggcttacagaaccttgtgcttactggtttcaaccagcgagttcgtccaggttttggtagcccactagtagcagtgaaagacttcatcaatactctgaaaactgctgtggatactggtagcttcactgaagttaaccgtttcctgaaacagcatatcagtgagtcgaaagctgaaggtgctaaacagaaagctctgctgaaacagtttgtggagttccacgatcacatcacagctaacctggataacatcatccgtactaaagcccctgaatatcgttatcaggactttgctcagtttatcctggatgagaatggtaactttgactccaatactaaaactggtattgcagcaggtatcttctcctggcttggtgaaaatggggataagatgttcctgaaccagagtgaagtagctaaaactctgcgtatcaaagaagatcagttaactccacaagctatgtctcgtatggctgatattggctatcgccaagacctgatcatgtcccaacttggtcaacgtatctatcaggctatgggcttcgctaaacgtcctgatgttgatcctaaccgtgccagcaaattgcagaatgctctgggtgcttatgccctccatgccatgtattccaatggttacatggaacagtctgtaatgactgctaaagagtacttcgatctgcaaaccatgggactggatgaacaatcagctaaagaggctgcacaagctttccagaatgactttggtgtttcccctaatgatgccaaacacaagattgtgtttagccgtcctgcacgtaactttgatgcagagggtaaaccagtagctattgaggcaatctctgacattaagaatgggatgaaggatacccgttctctcatgtctaagctgtttggttatgatcctgctgtacgtgaggttctgaccactaagcctgctggtttcaaacagaaagtcttcggtaaaatgaaccgtgaagttccttctgttctggctgctcgtatcagcaaagctatgcagtacgactacactattgatcagggtgtggtgaatgctatgcaaaccatgtccactgtagataatgctgccctgcaacatatctttggtgtacgtactgatgctgatgtacctaacgaaatggagatcttcaagaaaggtcgtgaagccaagaatgctgatattcaacgttctatcgagatgggtttagactttgctgcacgtactggtaacaagcctttctggatgcctatggaagtctggactaaccaacgtattggtgatctggcttctgagttcaacccacaaggatccaaagttcaccgtgccatgggtggcttgagtgctcaccaggttgatatcaaagtcgagcgtaatgctgctgtactggatgcagacggtaagcctactcaatatggcctgttccttgtttcactggctcagggtatggaagaagctcctgtaattggtgctgatggtaagaaactgaagtctgttgataagcagacctatgctaccttcttacctgctttccagaattacctgcgtaaaccagagaacattaaggctgtacgtgctatgcagaaagtgatcgctggttcagctactactgctgataccaacgtcattaagaatgctgtggctgagtatggtatgaatggtcagtcttttgctgccctgcataatctggctcagtatgctactgctctggagtctggtaagtcctctgttaagctactggctcaaatggaatcggatggtgttactaacggccctatccttaccaatatcctgaatggctctgctgacttcgatctgctgaagcgtggtggtatctaccgtgaaggtgacaacattaccaacatgcctacctaccgtgagctgggtggtcaggattactatgagctgctgggtgatgctatgcgtcagcattgggctgactacaaaaccaatgcacctgctagtcagcaaggtcagatccaggcactggaatatttctctactggttatggtgctcgttctaaggccaagactctggctactccattcaactattctgctggtattccagcactgaaagctgctatgggtcgagctactgtagaggatgtttactctaagatcggttccctgattccactggctaaaagcaataacaaagcagactttgccaaggcttatgctgaggtaagtaagaatctttctgtactcctgggtcagaaagtgaatctgccacgtactgctgatggtctggttaagttcagccttaatccggctcaaactaaacgcattattgatgtggattcccagactcgtggtgttgctacagaggctgctgttaatgaggttgctgctgacttcattgcatctcgtgatgctaataccagtctggttaacacaacctttaccctggctaaccttcgctacaatgctgctaaagctgcactgctgaagcaacgtattgctgaaggtaaaatccctgtggatgctaaaggtgctccactggaaggactcactcaggcagatctggataccctgtctaacatgattcctaatatgccttctgcaactggtgttctgtctgagaatactaaagcttctggttacccaatggctaaggtagagaaagcctttactgctaagtctcctgccaccagcattgatatctacttcaaagaagctgctaaccctaaaccagcaatggatgctaatgggatgctgttgagtcaaggtctggtaggtgggtataaatctacccagtctactgtgactgagactaagctgaccaatccaggggttgctatgggtgctaacgttactcagggtactgatgctgcgatcagctctgatgtgatcagtaagatcgaaagccagaacgtgcacgatgctaacatcctgtctcccgacaatgtgctgaaaggtgctcgtatccagaacaaagctatgtttgatgctgtggtttcttaccaccctcaacatctggctgctgctgcactgctgactgaagttcgtagtctggctgatgctaacctgtctaccaacgacaaggttgcagctaagaaagctctggaagccatgaagactaagatcctgggtaaagacttcaagggcaacatgaaagctgctctgaacacaatccttaaccaggcttatgatcgtgacattaagaaactggaaactctctctgaagtctatgctgttaaccagtacggtactgaaggtggtgagtacctgattactgatgctgatcgtaagaagattggtgatgagattacacgtctgaaacgtagccgtgctactggcttacaacgtatctctgacatgttctctaagggcaatgccccaaaggctgaagccagccagtatcctgacaagatgagacaatacctgtatgaggcttcggcctctacaggctctgtgtcagcttctgaggtgatggcccgtaccaaaggtaagtttgctaacctagtgtataacgaactccacaatctcatttctggtttgattccagccgatgctgtggtgaacgtactggatgggcagactatgcctaagaatgttaaggggcagtcactgccccagaaccgtgatgctattgcatggtcttatcaagataagaacactgcgcaggttaacctgtcactcagcaaagaggcttcacctgaagtcttgctgcatgaactgactcacattgctctgggacgtgcaattgctactgctgattcaaatccaaaagtaaaagctgtactggctcgtacagagaagctaatgggtagagtaactaagctggtttcagctgatcctcaattgactcagaagtttgcccctgctctggctaacgtggatgaattcatttcctggggtatgactaacccagaattccaacgttaccttgataccattactggtgtgcctgaaatctcaggtcgtaaccgtggatggttgggtactgcctttaaacagtttgtggatcaaatgtcaggcatctttgctgctgtaactggtcgagctattaatgctcgggttactactgctctggaagctctgaccttcgatactgcacacctggttcaggctattaaccctgctgctattgaaagccctatatcttccattagccatcctatgagcaacagcaatagtgctgctgatcaggtagctaagtttagccatgtggatatctttgataacctggcttcaacaggtggcaagactaactcagcacaattcacaggtaacctccgtaatgtaatatccactgtagcggatcagctttacggtgctttaggctcaagagtcactcagaatgccaatgagaattatactcctggtcaagtctggaatgaggctgtagccactgggaaagcccctgtcagcaccgaagcactgagcaatgggtttgtactgactaatcaggaagcctttgctgtggaggccattgaggctgctgtatctgaatccctggcttctggttttacttcaccagttaaccgggagattcgtcgtacttggcaagctgctaaacaatccctgaaaccagaagacttccataatggaaactggaatcaggcaactcaggcagaaaaacgagctgctcaacagaaatggaattatctgtttgatgtaacgaatgactctggtgagtcccagcatctgtctcgttttattgctatggctattgggcatgaagacaccagtaacttactcggcttccagatggaagatggtaaggactctggcaatactgcctttgaacaggctactgcttactttaaccaggctgttaatacagtctctggtatgctgaccaatacccatcaaggacaagctgccaatgctcgtgcccaagcattagctgaaaagctgatccagattgaacttaagaaccgtgataccaccatgaatattcttactggtgggatcgacaaagtagagaatgccttagatacggctgctgctaagtctaaacagttcctgggtaaaatcgttaaagctacaggtattgatcagtcctccaacaatgctctgaatgctatgggcaaagttgcaggtttggctgctcgtgatcagttaggtaacctgaaagatactatcaaagagttccgggactttaatgcccctaatactccagaaggctctctggcttccattctgactgaagcaacgaatgctgatgatgtacgcgctctgcatgaatccctgttacgttctactaaacgtattgaacaggatcgtgcaaccttagctgctgttactgctaagaacttgaatgagatgtttgataacaatgggcaagacctgactaaagaagatcgtacagcaatgacttattcactgcttcgtactgaccttcagtctgtattgcacattgaaggtatgaatctgaataacgtacataaactggtttctaatactggttatcgtaagcagcagatcagtaaccttgagaaaaccattagccagtatgctaacggtaatgataagatcatccgtgcgaaggctctgggttactggatggctactcgtagaaataccctgggacgtgatttagttctgaatgcaaaagctattgctaccggagctgctactcactattccacagtaggtatcgaaccgactcttgatgaagtgaacgccattgatgctctggcttcaatgtacgctctaagctacaccaagaccgaaaaccgtgttcgcactgctgctgtaatggaacgtgagcttgcacgaggtaaagacaatggcatcaaaatgctgatggctacttatgcgaacctgatcgaggattctgctaatacgctgtttgttggaaaccagttgtctcgcattaaaggctatctgcctgaagataccaatcctcaccatgacttacgtgctgttgagttggggagtgcagatgaagcagccctggtgaacatgggttaccaaccagtagccccactgtcccaggattctttgtcaaaacactctggacgtgtactgtacgttagcaaagagaatggatatcaacgaaccgtgtctggtactttcagcttaactggaagccagcgtaaaggttcatcaataggtggggatcgtgctgttgctgaccgtgttcgagctgacgagttagaacaattaaggcaagcgtcctatgcagacgtgcgaggacgtgaagcactgtcccacactgcctttgatccttcccaagttcaggataactatgtagtgcctgtgttaagcactgatggtcatatcatggacttccgttatatggctacccacaacactattgatactttccttgatcgtaataatgactttgctgatcttgtaggtcgtttagctggtcagaatatcgataaaggtgatgcaccaagccagaatgctaagatccttgaagccctgcatgaagactctacggctaatatcctgaagaatcctaatgcttactttgagattgggcctgatgcaccttctgagcgtggccgtgaaatctgggcaatgatgccatacgaagcacgtactaaagctgcctctttgtggggtaatgaccgtatgtacattcgtaatgatctggttaacctgacctttggtttccgtaagtactctctggctaataccctggatgtagatccagagcaacgtaacattgctcagggtgttgctgctggtttgctggaagctgcttttggtaataaagccaagtcatacgtaattaaaggtgaacgtggtattcaggaatttatgcagacctacaaagatctgatcgttattcgtaacctgaaaactcagttcagcaacatcatgtccaacactgctctgctggctgcttatggggttaaccctatacgcatggttaaagatattcgtactgctctcgttgctggtatcgattaccgtaaacagtattcattactgctcaagtatcaacagcaacaacgtgctggtattggtgactttgcccagatggaatccctgatcaacgagactcaggatcgcttgaatgctaacccactggctaagtttattcaggcaggcatgatgcctaccatcgtagaagacgttcagcctgatgctgatggttacacttatggttctaagatccgtaagaaatttaatgaggtatctgctcacctgccagcttctgctgtaacagctgctcgctgggctgtgattgataagggtactgcacctcataagttcttgagtgatgctgctcagttcagtgactttgctgctaagtatgctctgtataaacacctgacagaacatgccagagatcgcctgagtcatactgaagctttacaacgtgcctctgatgcttttgttaactatgacattccagctacagctactcgccagtatctggatgatatggggatcacaatgtttacgaagtatcgtattcgtattcaacgtgcaatgttctacctgatggacaaacgcccagcctctgttatggcacacatggctatcacagggcagttctcagcagcacctgatgctatggaacccttgtttgctcgtaaccttgggaacccgttcacaccttctgtattgcaaggtggtagcatcttgaatattccaatgccttggaacttattcagaatggcaaactaataaaaagcccctcattgaggggcttctttttggctttatgagtcacgcttttcctgaatgaatgctccaatgaggcaagcaataaaaattacagccacaaagaaccagaagaagctaagtaaccagaaagctaccttcattaaagccagtacagcaatggctgcaatcacacagaacaggccaataaagccattaataacgtgtctcatagatcacctgttagtcgaagttagcaaacgggtcgtcttcagtgtctgctggtttagcaaagcctgcttcactggtttcaactaccttggttaccggagtgtctgcctgagcaaacagctcatcaccttcagatgaagccagcccagcgtctgcgaacggatcgacttcttcagctacagcagcagcagctttagcttctggcagcagttcattttcagcacgcaggtttgcaccttcgtcaatgtcaaacggagcatcattgtctgcatcactggtttcagcgaagaggtcttcttcactttcagactgagcttctgcttcagctgctacctcggcctgagctgcggcttcttcagcagctttatcagcttcgatttcagctttggtacgacgtttacgacgcttaacaggtttgtcagtttcctgttcatcctggttgtcgtcatcgtgttcttcttcctgctctgcttcttcctgttcagcaacaggcgtaccaccagaaaccagaggagcttgcagatcagtaacagatttcaggcggaagttatcttcgcctacagctactgctgccacgatctgaccatccagaatacctacttcaacatcggctgctttggctgtaggcacgagactggtaaacgcatgtttggttaccagttcgatcagatcttcagtagaaagcaaaatacgcatagttaatccttagtagctaacatggttagcattttgaaagtttcagttttaattccagcatgtacggctgctacagcatctgccatgtgctctgctttactggcaatgatttggcctttgagtttgggccagttagcatcagggtataaaccagatgcccaatcaataccttgctgcttagttgcagaaggtttgccagtgatttccattctggtttcagtagcattcacacagattacaggtttagcaccatgactgtttcgtatggctgctattaatccaatacaggcacctgcacccagtgaagctctggcactctgactgccatgaggaacttcaatacagatggcatctacgtaaggcatgtagctcattaccttctcaaacaggtattcagctctggctaaatcctgagaagatttacgtacttgcttggaattatctttgggtggttggataacatccagcttggcaacactaagagatctggcttcagtgtcatataacattgcagccagtccccagttactaaagctcggatccatccccagtagtttgagtttcattaggatcctcttccatagtgaaaggcagatttaagaactggttcagagcatactctacacccagtttaaataaagcacgttcacgaggatcagtaatcaactcaggttgatcagcaccatcgaattggacgttaagatcgatatcgtccggggcttggattacagccagcaggtgatggccgatgttacgatgccaatctgctaccaggaaacctaactgaaggtggttctctactggcagaatgttttcaggttgatcctgtactacgtttgaatcttgggtcatggtaacctcaaagtaagccccctggtttagggggctgagttattacatggtgaacggatcatcaccagtggtggcattgtcagatcctgggttgaagccagcacctgcaaagttaccacctggagcaccagcgttaccctgaccagtcacttctttgaagcgatcccagacctggcctttgttagcttcgagccacttatctttgaaagtagccacttcttgcttaccacgaatttcctgctcagtcttatcgtctttgctgcggaagactttcgcaatggcattgatctcacgagcttcattgattggctcgtactgaccattgtcgtttttcttctgcttgttctctttgatacgctggatagcaaaggtgatcggcttaccgcacagatccaccagcataggaacatcagtcggaacttcggctttcttctcgaagttatacaggttgatggtcttggtttctggttccagtttaaccagaggcttaccacaagccagcaggcagatcgagtttgccttcaggaagttcttggtatactcgcctttatcgttgacgactttaccctgaccattcatgaaccagatctgctctttgtagatgccatgatcatcttcgaattcgatgttcatggcttgagctttggacttatccgacttggtaatgtaagccagcttgatgatgcccggatagacgtcagtgtcacgaatgcgcataccagtgcccagggtatctttctctactgctttttctgcgtcatagttaaaatcaaaataagacatgttagttaccttttgtttctaggccatggttctcatggaagcctaattcaattaatttctcagcccggcagatagctgcttcgttagctgtcttgaaggtacgttgccataccttcttacggttcatcgtgatttctgctacatagcgatcacgacgtttgcaataccaaataccttggtgaccagtaatggtattgctgatggcacccctgtttcgcatattctgaagcatcgtagtgtccttcagatttactgctctgttgtcatcacgaatatggttatcgtggtctacatgccctttaggccactgcctgttgtacatgtagtaacagatgatatgctctccataggtagtgccgaagattgttatatggcggtagccgctagccttgtggagactcccagcgcgactaccgataacaattctcttattacaagacttgctaatccaagtaagatgtccagtaagagcatcatattttagtaccttctcaagcatttcaagggtgagatcttctttaggaattttcatgcgtaatactcatgcaaacggtctaagaccaactgcatgtcattatcgatgaaggtttccttgatatcaaataagtcctctgggccacgtaaacgctcgttaatggtgttcttagtaacctgggtctggaacacatgcttgtacccgagcatctcctcacgctcgttaatgtgaagtaagccgttctggtattcttccagatccgtaagcttcactttcttacaggcaataaccagactgaagtatgactcaatgccctggttcttcagtgcccctttaacaggtacacaggtttcacgaaccatgtcatcgttaacttcatccttcgtgtgagctaagaagatcacgttcttggtagacgtggctaccagcacctgcatcaggtgtttgaactgctgggcaaattggccccatgcagcttgggtatttgagctagtaagtacgagctggctctctaccatatccatgtagtacgtcagtgaatcgactacaatggtgtgaatattcggttgggtttcagcccactgaaaagctttagggaggatatcccaacgtgcaatggtacgttccaggaaacctgatttgaacggcagctttttacctgactcacagttaaggtacagcacaccttccgggttcttcaggttcttcagtgaccgcgatttaccacttgctgatttacccacaagcagtacaaggttgtcattaacgctgatttgatcggacataattacctcttttgaaatgcccccgaaggggcaaacccacaaagggaacggaagttccccaacacacaattacttaactttcttagcaatggtgagcatgatgctcccatcaatttcactttcgtccagcttaccgggaagcttgttgtttagttccttcacctggcttctgatacgatccagagagaaccctgcatctaccagtaccatggcatagttgaacagctgcttattacggttaccgtcaccagtgttgttaagtacccaacgttccagattatccagttgatgctgatcagtgagcatctgcttacgatcttcgttcttactggttttaggaatgaaggggagtacatcgaatagctgaccatccgtatactcataatgccctttatgtgttaaccatttcttagaacggtgtgaacacgagtcatcagcttcaaatggcaagccttcaaggacgttgttataaaactccttgtagtccttggcatccagcttcagctcatagttaataggcagaatgatacggaaacggttagtctcttcggtatgtcgtttagtggtgtaatacagagccttgtagtctttcagcagtaacttagctgtagacagctgacaggttccatccacatcaataaccagaaggttaaagccaggaatggcattctcttcattacgataaccgttcatcactttatgggtgagccagtgaagatcaggctgatttaccagtctgtgtagttgatcgaatggtacgtctttaggtacgaaaccagtggttaaatccttgctgtatgacaagatcatctcatcaaggttggttggtttcagagattcaccactcaggaataagatgccatcagtgtagcttcgcttcacaatgatgttgtttttataaccataagcaatagccaggttaatcatctcatccttctggtttttaccgccacggaagtaaggcagatcctcatccatgtcagccagagtaacgtctgtgcctacatcagctaaatacttagccaacttggcatagttacgttcaggcgtaagcagcttggcaaaggcttcaccacattcttcagtaagcttaatggcgttctccaggtgatcctgagagagcacaggtgaaccatcgacaaaggcataggcagcagccagcttcatgcacttgaagaaacggttctccatttcacttttctgaatggtttgatactcgttgtactgcttgcttttggcttcacagtccagacgatactggatgatattcttcagcacatcacgagggatggtgatagcttttcgcaggttggaaatgtctgcaagcttctccagttttttacccaggtcagtgataaaggtatcagcattggcatcaaacatttgtttcaggatatcgtcagcagttatcccttctggtttcttggctttcagcaggaaaccaaagtgacaacgacgtgcatatcccatttccagcatgtcatacagacgacgctcagttacatccccatcaaacaacttggtcggtgtgccaaacaacagcatgttagttggagtaccacctacaagtttctcatggcgaacgttttcagcagatgacttgatcaacttatcttttactaaaccaaggtcatagagttccaggaaagtatccagtacctcagtctgacctaccaggtttgcaccgatttcatcgatctgtaaattcacaccaccagcattacccataagaagcttatgacgcatttgcttgacagctggggtagttgcagagtcaaagctaaacagcaagctgcctaagctttcaaactccttacgcaccttctccagctcatcctctggatcaaccagattagatgctgtggatttacgttgagcacgtttttgagcaagctcaaacatgttctgttcagctactgtagggaaagttacttccaggaatcgttcacggaatcctgcaagcaattcacgttcgatcaggctggtggaatagcctttaccagtacctgacggagacaggttcagagcgtagatattgataggcagatcgttacgatcataccctttaatgactgctcgcatagacgaggccattacaccccagtagtaagccagaactaccctgaaaaagagtcgttcttcgttaagggttttagcattgagaaaatcaacgatcttctcactggtgggatgatatttcatctcactcactggtttgatggagatcatacttgtccttatacttcgagatgaccagaacgaattagctcatctttttgtttacagattggaaaggctgggcagtatgcacaagctttaacttgaccagggttatgtacgatcatacccacgttgccatcatcagccagtcgcttgtaagcttcagcttcagtgtcaaagtttttggttgatcgggtcatgtttgcagggtttttgtagtacttccagaccggagcatcacgccataactcttcatcagtacactcgggaatgtcttcgtctttggcctgtttatacttctcatacagggcaatacgaccttccacatacttctgagtatctgccacagacattaactgataacgtttggtttcagtcttacgctgtggatagttagggttagctttggcttgggcacgttgccagtcggtaaagataaactggatagacattacatctttagtaatgatatctgggttaagccagcgatagatactaccttgcagggcataatccagatccttgctgcccttcatataactgaaggttgaagtggacttaaagtcctctaaagcaccattacctacgaagtcaaacttaccagtaatacggtaacccatgacttctttctcagatcggatttccatatacactgggatatccccagccttcaattcccatggtttagggttaaccttaaccttggcaatcaggtcaggggagtaacccagcttttccatagctttagggaagttttcaggtgaccaagccagttcgatacctgagtgaatagctgtacccatacgagaagctaccaggtcttccaggtcagctgtttgcagctctggaggaacacggggagtcagtatcaactgacgaataggcttcagcagtttggttgctgagaaggttccagggatataatcatagtgatcagtagccaggaacactgccatagacagtgggatcttagtgttgtttgtgtaaatcattagctgattcctcaccccacaaggctgcatatgctgccagatcttcaaagttatccagcttaaaatcaccctggtttgcccggacgattttcagtaggacttgaatgagccacccatcagccggggtaagatccttaccacgaatcttattgaacagctcaatgaccaatggaatggaacgttcaccttgatcgttatcataggtaactgcacgatcctctaaatgcccagcagcagccagtagtaccttgtgggcactgactgttgtatccactggtttaagtttaagatcttcaagctgtgcctttaggttagctatggattgctcatactttttaacctggtttccccagtaaacttttttgtgctctgcacaagacatacctaagtagttcttggcttcatgcagacacttttcagcataagcaagagagcgttttaatgatcttttactcatttggatttcctttgcaaagaattcacagagtgcccggaagggcaccccacaaaacacttaagcttgacaacttaagcattcatccttaacaaccacaccacttcgtgagtagacgtagtaaacagacaggatttcttcatccagtacacaacgagtcatcaactccgagatcagatcttctgaaccatcttcaggtacgaagaagttcagggactggccttggcaaatatgtttctgacgtaagctggcacgacgtaacaggactcgttgatccatttcaaatgcagtcttaaatacctgcttctcatggtcatcaagccagtcaacgtgttgtactgagcctacgtggttaatgatatcgttaatggtttctgctgagtacactccacgttcctgcatgagtttgtaaatctcaggcacgatacgactgagctgcccagcagcagagctggcttcaaataccattccaggatccgggaaccaggattcagatacaccacccattaacagggctgtgctcttggtaggtgcaatggctgtacggtgagtattacgtacaccatggccttcacaccattctggttcacccatgacttctgccatccactgagaagctttaaggctttcatcatggatatgcttgaagatctcttggtcgataaattgagcttccagtgactcgtatggaatacgcttcgactggaaataagtactgagtcccattacacccaagccaattgctcggcccttgatggtgaagtctcgtactttttctaagccaacaataccatcactaacttcaatgaactctgagcacaggcagtccaggaagatagtggaatagaatactgccttgctggttttaatcttatcccagtgaaccaggttcaatgaggacaggatacagctgtaggtcagatccttggatgaatgcagcatgatttcggtacacaggttgcttgccttaagcatcaggtcacggtctttgtacattgcaggacggtggcggttagccttgtcgatgaagtacagataacctttacctgtcagcattttgacatgcacagcatcttcgaatcgctggtttgcttctgcatcaccagctttcagtttctcaacgaaactatctttaatgatccagccataattcttaccattgggatcagttttcagtgagttaagacactcatagaaatccccatgctcgatatcgagataggcaccaacagaaccacgtctgttacccccctggcttaccttgctggtacaagtgaagaagtcatcaataacttccttagcaccattggcaatgccaccagtgctgatcttggcaccacgagggcgaatatccgagaagtctgctgaagtaccaaatccatatttggacaggattgcagtctctcttaaggctgagtagaagccatcaatactatctgctactacctgcccagaacaggacacaggcataccacggtcggttcctgtattagccagtgctggtgtagcgggtgacaagatgccattccacataagatcaaagaatgctttttcaagctcaccacgataaagctgtggtacatgacgtgccagagtatgtgcaatcttctggtgacgtgctcttaatgagccttcactttcgacgatgtacttactcttgaacatttgccatgcttgagttgtataccaatcagggagtaaaccctgtgcttgtaacttcttacgctcggcactaagtgcttcgaactcagtagcgactgaagtctctactcctgtaggtttaaacgacatgcttactctcctggtttcaataaagctgacagatcacgggcaccagatagctcagtagctaagttctggttaaagcccagtttatgcttggcccagttacgggtgtactgcaactgagtgccagcaaagaaatctgcaaacttataggaagacagggaggtatagaaccagctggagataacgcctgattcttgctcgaacatgttcggcatacccagacgattaagcaccacgttcacacgatcacgaatgaagtgctgcatttcttctttggttactacacggatggtttcaggagccttggcaaagatacgttcgatcatagcgaactcatgatcgtgaacatccttagccatcttccagatagcgtcggctaatgcttcctgtttggcttcatccatattgccagcttcaatacgttcttttttacaggtgttatgaagccaggaagagaacatgctgtggtagttctcatctttggctgaaccgtcgatacctgccacaaagtgagggatcaacttaaagccaggacggctgaacgatttgaagaatgcaaatgctgagaacagcatcacaccttcgaggaatgctaacgctgctgtagcttccagagcatcaccagaagacgcttgctcatcgatccatgcaatatgcttggacagatcttcatcacgcttccaggtggtgtagaactcgtctgtagccagatccaatgactgattaatcagatcatagaatggggcatgagagttcagctcaaccatagcgaatacagcacaggcacgttgaacatgaggacgagggaacagacgttgaatacgtccaccccacatctcttcaccaccgatcattaactcatactgagtcagaacagtttggagagtgaggataccttcacgttcaccttcagttagcttgttgtggaagtcaccaacgtcttcctctacacccagttcttcagcaggccagaagatagccatctggctagtggctgcttcgatagcttgggggtagtcgatgacgtaagactctgttggagtctcaatacgtgagagaggtttagtcataatttacccaaaagaatattgagttggttgaaaagggtagtgagcataactcacttccccggattctgtaatctggttatttaaccattatgacttggtgagtgctgcccagctaaccgggaacaaaggttccacaatagctgctacagcatgggccagatcctgaacttcctgctgtgcatgagaatcagaacgtttgttaaagaagttagcaaaggccagcaggttgcctgtccaaatccagttaaccatagcaccttgtggtaaaacaaagcgtgcttgctctggtgcaacaccatcttcgatcatgcgaagataagcagctactgctttatctgttaagcgtttgtattctgctttccaaatctcattatgaggatggataccagcactaccctgcttgattgaaccctctggtttctgacggaattcaggaatgaaaatctcaggagtaacactgatatagcgacgagattcctcattctcaaccagaccctgtttatgcttgaagcattgggtacggattgggatcggagccttcatacgcaatgtgattgcagtatgggcgaacggtgtccagtgagtagcttgatgtcgaatatcttcataaatctgaagtgccacagcaccacttgaaggcatcccacctaatgttccattttggatcatattgataattgcagctttatccttactggttacaccattagcgagaaaacggataagactggcatcctgttcaggagtagttacctttttcagggggccaaacgagatacgagcaacgtctaccacacgtttgtcatcacccatgtgatcgatgtattcagtgacttgttgagtcattttgagtcctcagttaattaagggcactatctgcccattgatcctaaaatagtttactatctagggaatctttctatagggggttacatatgagtaacactacgcaagttaacctttatctgaaaaaccctaacggaactccaatgactgatacttgtgttacagtcaagcctgtacgggcagggttctggtctggttttgcaggtattgttgaagatacggaaatggtatttaaaacagataaccaaggctatattgctatggctctgtggcctttaccgtatccctactatttaacatattcagacgacgatgagtccatgccagggcagtttttattttatgtccctgctgtggattatcctgttgcttttgaagacttgatcgtcactaaagctgattccaatgataagtatgctgatactattcttcagcaaattattgctgcaaaagtagctgctgtagaggctgcaagtgaagctgaaaccagcgctactgaagctgctggtcatgcaacagctgctgctgccagtgaggctacatccacttctaatgctcaggctacccaagctgatcgtgcccaggttaatcagctaatgactgatatgactgccctttgggcgagtctgcaagaagctattgttaaaattcaggctatcaacctacagaataagttaaaactgggtgggtatactctttgggtggacgccagtggtaaactccgtatctttgagggcaaccctacaagtgatactgatggtgtggttgttggtactcaaacggcttaaggtgactttatgactcgatataatggctgtggttgtggggggcatatgcataatggatgcagcccttgcacctctaataatgagatacagcaagcagtaaatgatgctcttgctcttgaaaaagagaacctagaacagtatgaaactaatgctgcacaaagtgctgatgatgctgcaaaggaagcagccaaagcagcagagtctgcgagtgcggcagcacagagccagacgaatgctgagacggctgctggtacagcagttgcagcatctaaagtagtcactgatactgctgtagttcttgaagagacggcagaatccattaagagtatgggtgaagatctgggaaaccagattgctagtatccagacccttcgctatcgcttggttattactgagcctacgacaactattgttttacctgaatctctgagcatttttaatgttcgtaccatagatatccagggtattactatggatgttgatgagcatttttcttttgataaggcgtcacgtacagttaccctgtttgatccaatcactgctgaagaaattgctgaagcagcttctgaaggtatttttgttgttgtcatttgtgatgtatataacacagatgatcctacgagtttccctttaacagttgccactgataaaggtgcaactttaattggtacagcaacagggaataccctacaggaagagttagatatctttactgctgatgcttttgcacagtggaaaagactgctggcagaggcagcttataacctggttcctggtagttttgaaactgggggtactctgacagactcttcagatgctctttgggacagggttaataaccaatgttatgtttgggcaggtacattacctaaaacagttcctgcaaactctacccctgcattatctggtggtatttcctccactggttggataagtgtagctaacaatactttgaaagccctgatcgccgctgccactggtagtaccttagttggttttctccagtcaggtacgggagctacagccacaactgtatggcgtaagtttagccgtattattgatgttgctgactttggtgcagttggtgatggtgtaactgatgatactcttgcagtacagcgagctattacagctgctggctggggtactgttaagtttgaagccaataaaacgtatatgacaggtaatctgtctactaccacaggggttacgttacagggccacagcaaaaggggtaatagccaaattaaagctatccctggtactacgggtaaccaccttacttgtagtgcagcgagtgcacctactattcgatatatagatttcaggggtgactggacttccccaggatcacgggcaaatcctactcctccagatgtacttggggcacttaatgggatctaccttacttcagcaagtcagtatgcaacttctatccaggtgttccattccagtatttcttactactctggttatggtatgtataccggctctgctaggaacatgggtagaatggaatacacttcctgtctctactgtgcactccagtgcttgtatattagcagtggtgctgactggatgattgaaggttgctcctttggtcgatcactggctgacgaagggatgtacattaactgttcatctttccgtatgtctaactctgaaagttatgaaaaccagggttcagggatcacattaggcccaactgccacagttactcgcattactggtaactggtttaacactaatggtaaaaatggttgttactataaaactcctggtggtacagaaggccacttcagtgatggtaacatcttctttgctaatggctgggcttctaaaactgctgatgaagttgctacaaacaactatgcgaatattcgtattgctggtgggatatctaactttaaagctagtaatatccactttaactatggatcgacttccacagaacgccgagtggcatactgtgtctatcgtgagaatagccagcttaactatattggcacaggggatgttgttaccactttcagtagcacagtgacttctgcttgctctgagattgggtatagtaacttcgatactgaagctactcgacaaactcagtcagggactgtacaggggtggagacatacctttaaacagtatgcttatacccctactactgtagttgcctcatatcagacttactataagtcttatgctggtttagaaatcaccccatctggtattaacattggtaacggtgatgctgctgcaacatcgtttgtaactggtgacggtactcggaatactctgtataaattgggtgcaccaagggttacttatgcagcactgacagccggtgcaaccatgtctgccactgctaccccttgggtgtattactctacacttactaccgatgctgtttttaacttaccagcgacactgggcctcaatgatggtacagttgttaagtttaaaaaatccattgcagcaccaacatatacctttgctcctactctgaattcagatggtactattgctactattctggggccagcaggtgtaggacagacttcagtagctgtcactgataccaaagagtatacgtttgtgtggaatgctgctaacaaccgttggatcatgtaagaggaattactatgtcattgacattaagcaaaactattgcagtaactaaaatctctactgtatatggtgtatctctgggtgaggacacagctgctgctgtgctggtttataatgtgaagtctgtaagcatcacagataacacgatcacagcagttgtgggcttatcccttaatggtgttaataccccaactgatacaagttacacactaccttatgatgctaatggtggtgatgttaccaagcaggtagaagcttacctgcttacgcaagatgcttttgcaggggctgttcaaagctgacttcaagagtaatacttaaaggggcttacgcccctttgtttttatagaaaaacaacatgagggttcacccatgagaagtaataacactccgttagggccagtgaataaaggcccaaacaaacatgccattgctcgtgtatttggtgttaaaaacactgaagtaacttatcttaaagaaggtgttgatcttcttgattttaaagttctttatgatcctgctactcagttatgcttctggaaaggtgatgctacaggtgtagtaaatacatggtcaatttccggggatattctcggaattaacacttcaaatggtgtttttagcttatctcaagctaaaggcggagactggttaaaaaccatgttagccgacgttactggtgcctccttggttaccatggcatcaggtaaaactgttgaaaatgtgttggctaatattgtagcagctcttgggtatgttacccctgagatgtttacaggaactgatacagagcagttacttgctgcgaataactatgcattaactaactctgttaacttcgttcttcaagcgaacaaaacgtatgccttaactggaaccactggtttaaacattgatctcgctaaaatgtcctttggggccatctttggcagagcacgaattgatgccacaggttttacaggtgatggggctatttggattcactcctcagctacgtaccctaatgtagggccaaaccataccaactctatgcgaggtgtggaaatctttggttccattgtttcgggccaggctggttgggttttaggtaataaaaattccgatgctaatggcacctacaatggtgactgccatgtctatgattgcgtggtacgtaattttgatattcgtattctgttcactaacagtacctggcgttataagttttattcgtgtggtatcacgaataccgcggtagggacatacactctttatgctccttctggcttatctgattcgggcgagtctatctcgtttattcaatgtaagttctacgacaacaagggtaacccaattctcgttgcactttcttactgtgctattagttttgtgggatcttcaattctgaatacccctatcagtgtcacaggtacaggtagccacttgtcactttctggaatgggtaatatggagaaccctaaccagcaatcgtggtacaggtatgtgtctgttacgggtgttggagctaaattcagttttaactctgccaccataatctgtaaccagccaacagcacagactaagccattattctatattggtacgaatgcctacatgcactttggggatgttcgtttaacaggtaacgcatacccattcgaaggtggggatgacttaatccgtagttggtgtgaaggcccaggctacattactgaatcaggatgtaccattgaccctacttctggggtgggggcaagaccactgcataagtctatttctcctatttataactttagttttgaaacaggtactactgctgggtggacagtgaatgcatcaggatctgctagtcagactgctgttgtaagtgctgattctgctaaagcaggtacttatggtgtacgtattacgtccatcagcacactgagttgtttccttactcagcgttttgtagttaccccaggacaaaccattactatgtctgcctgggctaagatattaacagcaggtgttaatggtaactctgcgggtgctataacagttacctactacacgaagagtggggaacaaatctcttcacaaggctctaatttaccttcagcagtaactgattgggcagtgtatgcgtccttcgttatgggtaaaattcctgtaggtgcagcagaagctgtagtgtccctgagtgctaaagaaggggctgttgtagactacgatgcaattcttattaacttgctggggtaaaccatggaatacactgttgaagttttttatcaaactgaagaggatactcttcctgttgttgaaacagtcactttggatacttcaagtattacaggtgataataaaaatgaagagattattaatctgatagcagatactcttcaaaaatcagacaagtacaaggataaagtagatttcactatccgagtacgtttgtaaaactaagccccttcgggggctttttactgaggattaactatgaaaatgtctaatgaaggtaaaaaagtaactaagtattttgaatccctaaagctccgtgcttaccctgatcccgctacaggcggtaagccatggactattggttacggccatacagggccagatgtttaccctggtttagcaatctcgcaaaccagagcagaacaactgcttgacctggatattgctaaagcagaggctgaagtaaacaaatatgggcataacttgacccagggtcagttcgactgccttgtggatatggtattcaatatgggatctggcttcatccgtccagataacatcaagggtgactttgatgactttgtagcatcaggtaacacggttgagatgcgcaaacgtattccacaattccgtatggctggtggtaaagtcatgaaaggtctggtacgtcgccgtgctgctaaccttgctctatgggatggtaagtccggtgatgaagcaattaaattaggggtagctgctgcatgaaacttgtagaaaactggaagtcagcatggaaatggtactctgtgcatattatggtagtgattgctgcacttcctgaaatttggggatacttcccacaggagttcagagattcattacctccccatgctcttgctggactgacaactttcctgggtatctcagctattgttgctcgtctggtttcccaggagaaacgtaatgatcaaggatctaattaaacagtatgctgttttattaggttctgtgctggccctggttttacttgccggggcttgttacttaacctatgttgtaactgataaccactggtctgctaagtattctggtttagaacagaagtatagtgatgcttctgccaaagctactcaggaggccagagtcaaagaatgggagtaccaaaacaatgttgatgcaatcgcacagcaaggggctaaagacctcgcacaagctcgctctgacgctgatagtgccaatgcttctattggtaggttgcagcaacggatcaaccgtttacttgccgacaccagctccgaagattccggcactacccaaagaggcaagacagccagagaagccctcgatctgcttgccaacgtgctcgaaaaatctctcgaacgaaacagacagttggctgactacgccgacaaagccagtagtgctggactcacctgtgaaaaagcctacgacgccatccaatcaggcaagtaatactaagttggtttatttcgtataaaccagtagaatgatgtacattaactagacttttcatgaagaggaaacacctatgtctaaagtcccctctatcggtgctggtgttatcactaccgatgatgtgctggcacaaggctatgatttcgtccccctgtttcagggtggtatggctaaagtgcctgctgatgtagctgcggcagtaaataaagatattactggtgctgcttacactaaaccgtcagctctgagcctgaccactgatctggcagctaccaaaactgttgttgaaggtgctgctctggaactcgcagtagttgctactggtggtgttgcaccgtatagcgttacctggtttaaaggtggctctgctattcagactctgggcagctctacccttaacctgggtgcagctactctggatatggctggctcttaccatgctgaagtctatgacgcagcgggtaaagagattcagtctactacctgcgtagtgactgtcactgaagctggtggttaatagctaccagcatgaataagcccccagttgggggcttttttattaccctgttaaacctaaaaggttatcaggatcctttaccgctgtgtctttgataaagacaaaaggcacaatgatcttcccgaaatggaaggcattagcactttctacaattttatttgctttgaaagtgagtgctccgttatttctgaaaaagatagttatttcagctggaattttgtctgtcatagagaggcaatcctgtgagttgcagccctgatacgattaatgcggttagtatgcactacctcatttctgtcataccctcgggcatttctacgaatggttgcgtactcagcttgtacagcaggattctgagcacgtttctggaggatcttggagcatttagaatgcacacgtttactacgttcgatcccacatattggacagatgttaaaggttgaactgatgatcatggtttcagaacagcaatgatatctttcactacttcccgtgattcagctttagctgagatactacgggttgcagttaatgggtgaatgtcaaaaccagctttggtatagagatcaattaagcgtggagcactgctattcgtaatgaccactcttgcacctctggctttaagctcaagagctttacctaccagacgtttctgatctccccacttgaagctggtgccactgtagcttgtgaacccctgatgtttaggcattggctcataaggtggatcacaaaatacaacattaccttcttgagcagtatccataaataacatgaagtctgtgtttgctactgttggtttcaaatcagaattgatgaaatctctgagttcctgttcagggaagtaaggttgttctttctggccccaaggaacattgaattcctttttcttgttgtaacggcacaggccattaaagccagtacgattgagcaccaggaagaacacagctttagacagggaattgaacttaccactgttaaagttagctctgagctgactgtagcgagcttctgagttacaccactcatgcagtttctttgcctggttcaacacataatcaccattatggatgagggctaagtagagctggcataaatcaggatttacatcattgatagccaccttatcgaaaccagcattcataaatactgatcctgcacccacaaaaggctcaacgagacgattaccaactaagaatggttggatttggggaagctggcgatacttaccacctgcccatttcaagaatggtttcatttgagtaccagtgctaacaggttcataacaagatcgtaggcttgataagccaaccaccagaaagcaatcaacaagatcgctatgatactccacacttttccgcgaaagctcataaaattcctatcctctttttgagtaaaatttcagtagttaaaggaactgataccaggactttgatgggtaattcaacgtcgccataggtatcccaggcatccccttcagtaagtgacacaattccttcaccttgctcatttagttcaattacctgatcaaaggcgcaaaaccaactatcccttggtgtttgaaatgtgactacctttttgttttcttcaataaattggtcattgaacattgtaaaagtatcatctacttctacttccacttccttttgttgaatcaggataatgatatctgtaatactagttagatccattgcagtaatctgcatgatcccctccaatgaaaaagccctccgaagagggcttgaggttacttaggtgaacctgtgtaggacgtcttgccttcaaacagcctctccacatactggaagattttaatccccagataggcagatgctgaagtgaatatgggttgcgtgatcccagtgggcaactgacttgccactacagggtaagcatcccatgccaaatagcctgcgagtagagctgctgacatttctgtagctgctgcaacgaaggttacctgaccatagcgtaggattcgtctcccaacggagattgcaccactgaccgtactaatcaggagagcacccagtagctgaacataaaagttctgttgctgatctggggtcatgacactactccaattcacttacatgaaatggattgtaacgttaatttactttgaatgctcagaattatctgaccataaactagcaaatttggcgttgatcgctttcatgaaccctttctggttatggttacgaagacgcagacgactaaagttaatctcatgaagacctttagtaatacctttaaggttctcaacaaagatagccttatcaggttcttcttgaaccagtgtgactttctggtttagaaagtacagctgaccattaagcaacgtccagaaaccagtgcattgatacacactctcagccactggagcacccataatcaactggcttgccagtgatgtgatgctttcagggcattcaaggtataaccctacttctggtttgaggtacttgagttcaatggaaagttttaccatggctcctctacgctaaacttgggaaccaggattgaacagacattaggcagatactttctgactttgttaatgacagatttgtcatcatcgatcaggaaaatttccactttgtccattgtagtcgaggcacccatacagaacattggaatcagcgacagcaatgcttccagtttgaagttagctgcactgccccccaggttttcacttcggttatggagtaagtcgaaggtaaggttaccctcttctttgaaacggtcgtttgtttctttatccagaaccttgctacggttagacaggctgaccaggaatgaatcctgattaaccagcgatttaaccatctcaatacctttatggtttaaaggctcgaacacccaggctttatgccagtccagccattcatgctggtttgagggatccttggggatatactgctttcggaactcactgttaccgttcagcacaccatccagatcacagaagatcagtctatgcatgtgatgcctctttttgttttagcttatccagtgctttagccacaaagggctttatatcatcttctgcgaggttgttaggcagggtgatagcattggcccagttggggtagtacaagtccagttcagctggtaaggggattcgtggatcggcaatttcaggtaaacctttccatgccatacactcaatcaggttgtcattaacaaacttgattacccttacgttgttacgcatcagcacataaatggcatcatgaatcagagccacaggcagaatgtcataacgaaactctgacgcccatactcgttccatgaactcattagcagcacggttggttaacagaccataggactggcctgagatagcattgcccaatgtacgtccctcagcttcagcttcacgtagcgtcttggtggtatccaggatcgaacgtgcaaggagcggggtacgaatacgcagcccaaaggcagcagtggcatagccatcgttacaggcttgtctgatacgttctttaacccattcaccagatacagcatagagagcatggaaactggcttcagtttctttggcttcctcttcagagaaaccacagttcttaaccagggtaatccaggtgccttgatactgaagtgcaaagcttggtgctttagacttattacggagtgggtagtatgggtgatccttctcagctatctggtttacagaagctggatcattaatgtcgatatccggcattaatttggcaccccagtagcccacagcacgtaatgagtgaccgtcgaagccatccgtaaacactttgaccttgttaggatcttgcgttaacagtgcattgatacggtcttccagagcattaaagtctgctccaccgaatacccaaccatcaggtgcagcaaagcacttcttgatgagtttaccgaaggtactcccagaaggtagctgctgtaggtttggatccgatgagcttaatcgccctgatactgtaccacccaggttgaagttaccatgtaggtaagatcttccattacctttgttaaaggcatttttgaaggtgggtataaaactggtgaggattttctcgccatctccaaactcacgaagagttttgagtactatttttccactttcagtagcatggttttccagcttcttaagtgttgcaccagccgtagatggttgcttggttttggttctgtctagtacaggaagtttcatcacttcataaagtaaagtgatcagatggttgccactattggggttgaacttaaggtgactgaaagcactgagagggtactgtttagtcttcagagtggcattcttagcttccattgccctggtttggataagcatttctgctttttgaaccagggggtgtgcatacaaagttttaaggcttcgatcatgcaattcctgtaattgcttctctgccttatccaccatagcagggatcataggcataccagtaagctcaatctgggtgattgtcttctggcttggcatcatcaggtatttatacagctcaagctgcatatcacgaaccataacagggtaatacttgttatagacgtaccaggtagacatggtatcgatgatgttatagcggagcagttcaggcagggggatcaccaggatattggtaatatcagacatagcccagttacctgcaaattcatgagcaagctgtttcaagctcagttcattctttgcagtattgttcaaagcgagataagcaatgatgcgagtatcatcacaatctcgatagagacaatccaggccacgcagtaaaccttcattatccaggggatctttcatccagaggttatagatcagaactttagtatcaaagttagccctgtggaatttcaggttacccttatattcctcaaagaacttacgcagcttaatacgaaagccttcgttaaaccaacggtagttttccccttcacttactgcaaggtcacaggtaaatgctataccgcctgtgttatcagggctgaaagcaatagtgccaataccagcagtaaagatatcaagactaaaagtttcgatatcacaggtcagcttagggtaggacattaacttggcaaatgcttcgtcaatttccttttcagtctggggatacaaggcccatttcaggatatcagcacccaaagctttatagctattggttaccttacctgctaaggcttgcacagacatttccagcttatctgcctggtttgggttatagagtagagcctgatagttaatacctaccagtatctcgatatcctcataccccggtattgaacaaggagtgccataaccgatcattgcatcgatcttggcattcttaaccagacacttaaagtaagtggagtcagcacagtaaatgtacttaatacccatcttcttaagctgagggagaattttagccagatagtccttacagaacttagctggtgctttgccattggattcatactccagcgaaaacgccagaatgttctctttggcatagccagcttcgactaaagggttaacgtagtgacgctcaatctgatcctgatagaaagcagactctttgatgagtattgctgtctcgaattcaggtttatgagcgaacattatatgacgcatagcctacctctctagtggcatacgaaagaagaggggccgaagcccctcggtactacttaagccaggttttcagttcatcactgactttcggatcaagtccgaatgctttcggccctttcttacgagaggacatgaagaactggagttcccctgctgcatctttggtgtcagcacggttacctttggctttagtctctttgaagacacgatacagctcttgtgcctgctctttgactgtcatagccttaccttctggtttagctggggattcagcttttgtttcgggagtagtgaccttgatatcactggcttcacgaatggacaggatcagctctgcatccccatcagagatgcccagtttagcccagcctttcttagctttctgtttggcagagattaattcctctgcaaacttctgagcagtagccagatcttcagccagataagcagcttcaaattgatcccaaaggaggtcaattttagtcttcttgatctcaggagcaacggctggagtaggctccttcagatcagcagccagcactggtgctgccttttcagtaggggctgcttctgacagatcagactgttccagcgtttccttaaccagatctacttttacttcttcagctttcgctgcttcagtattttcgactttggtgtaagtcacattactaccattgtgaccgcccacttcaaccagttcagtgatgcccacatgagcaccccgcagaactttgttcagcagctctttaccttctggaatagaagagatagagccaccactgttgacatggctacgcagactttcaggcagcacagcaaggatgtgataaccacacacacgcattttagtgtgactgtattctggtacagcaaatacgtcttcagggcgcactttagccatcacagtgacgttgccagagaagctgctgagataacccagggaagctacgtgcagaccgttagaacagtcctgacgacggttaggatcaaccagccccggacgcatgaacacgtaggaacctacgttctgcttgatattgcctgaatgtacatcgacaaaggtattacctttctgcttcagacgtttgtagataacgatacagccgtcatctgcaataggtaggtcaccatattcgatgaacttcatcaggtcttcagcagaatgcccacgatctttcaggacaggttccagacggttaatgaaattcacgaagccactgaaatccttcagcttgctcgctgctttcatctgagatgacagcttgtgagcgtgaggaatcacactacccgtctgagtattgactgccacaatagtgtcaggatcctcatccgtgattggtttgtgaaattcaggatcatcaacagtactgcctttgcctgcaagctcacgcatacgggctgtagccagttcgattttctgatcattggtgagttctactggtttggttacctcagccacaggggcttcaactactgcttctactgccacaggttgagcttccagagcataggtaaggtcatcagcttcttcaacatccagaatggtctggcctggtttgatacccagttccagtggagagatgtgagcaacactttcatccactttttcaggagattcagtgtcgatgaattttttgatgaaacttttggcaacacggaagaacttgataagtcctccagtgccttcttcagtttctttaaattcattgcgtaccttgacaggttctgcaatgtctacaaccgcagagccatccacagggatttgctttttggctgtttcgacgatgatcggcaaacgaggatcaccctgtgcaatggtcacagtactgccatcctctaaatagaggacagcattctgagcatcgacagagattcctacgatggtcacgagttttttcatgatttagttccgtttttgagtgcacttaaaacgatggttttcagagcagaagcccgctctgggtattgaatgagccactgaaggacacttccgtcaccatgcccaagggcacgtaacatagggtctttacgcagcactttcaatttcttgataaagggtaactcttccagtctaccccgcatgatggtttggataggatcccaattttcatctgcgttgagcttctcatactcttctggagtataagcataaacagccactgtagatggagtaagatcgagaatacgttcgaagtagggatcataccgtaacttttccaaaccaggcagtttaatgccgagtttagtacacagcttgatatcctgagatgagatacgatgctgagtagccaaggctttctggcgttctttcgtgacatactttgcaaatgctttgctcaataccacttgtttaacacgcggtataaagtaagcatccacgtcaatagcaccacgattttcagccatacgacgttcgataccattacggacaactaccccatcaaacaagtcttctggtgtagcatccttcagatgaagaaagcttccgagcatacccccatggatatcatcaatagagatgaaatacttagggttctggtttacctggcttggctctttacatgaagtaatttcacctttattaacccagttaccatttttcaggtaagcagagacagtacccagattattgcctggtttttcagctttaatcttcacttttctctcacgcttttcctttgcttcaaggatttcctgataggcaggatcccattctacacctggggtcagatccactacagtaaacccaagcttttccagttttgctgtgacagcagcaatctcaggagctttagctcgtggatccactttcagtgcccatgcagcattggaagttccctgaacataatccttatatgctgacttgcttgcagcaatacctttcaaccgggaagtgagaaacactacctgattttcaaggtaagttacgatctgagtacccgagaatgggatacgacgcataaagccatcgctatagacattacggccccaccaggtattttcctgggtactgaaacgtaagctcttaaccgagataaaatcagctccagcaatacctcgcataatacgtttgatggtatgtttgcgaaggaatgcatagatagcttcacgggttctgagcgtgccaaacgtagtagccttacgtaagtcccacagagcctggttagcatatagccattctggattagtaaactggtataactttttgaagccaacatgctcggcttctttgagttctttccagtacttcatacgaatagaggatcccaggttactaccaagatagcgtttaactacgttaggttggatttcctccagaatgttggcagtgctgccaatagcaggttgccccttggaaaacttgccttcacgcatacgtttgcaagtagcagcaatagaagaaggaatctgagcaatgatatccttctccatggttgcaacgagctgtacacacagatcggttaaaccatcttcagttaatttctggctggagagggcttcacgggctggggttaacgccagagtatcaggagctgcttgaaccagcagacgttgaataccaacgatttccataaactctgagagcatcccagtagctttgctggtggcttctgtaaacagcattggatagatgacagcaccgtaacgcacaaagattctgtggttacccatgtacttgttataccaaacttcgtcgtctgtgttccatgccccagcttcctgggacatacccagtttagtcataggctcaaattcgccacccatccaactgagttctgcattcatttcaccatgcataaccagatacttcagataggtacgtgctgtctgagcttgatccagagtcaaacggaagctgacagttaaaccagagcgagtggtaggaacgctaaccataggtgtaatacctggtttgccttggttctctactactgaacgggccatgttatagactgtcttggttccgttgtattcagaggttacacggaaggcatctacaagcgcccaaggggctttactacccagaccaaagccaccagtagtcttactgtcgttacgcttggtggaagcaccataggtgccatagatttgggcgatcttctctgggggaatgcccagaccattatcctgaatgatcagttcaccatcagtagtgatggagatcttcaggggttgatcggtagtaccagcttcgatgttagcatcccatgcgttgcacagtggctcacgaatagctgccagcagctggtttgaatacaggttagatgacagcatcatcagaaatgcagcatcctctaccatggatacagcgagagtttccccagcacccagagaggcagaggtagatttgttttgcatatccgcaacttgcatttgaatatcctcaagtaagatttactaagacttttaataagaaaaagccagaataaatctggcttatttgttaggcagcttggtttaaggcttcaataccttgtggtgtgaggtgccagccatacatttgattaaacttgataagaccagctttagctaaagcagtccctgtacggtttttattagaacgaggggcagtaccagacttagccatcttgaggaagacgacttgttgcttcgagagcggcatttcttttcctttcaaaacgtaggtttttgagtcctcccggatagctatcagctattcgtctggcaagacgatgggagatattaaagtgagcttcggcctgttccagcgtgtgatcaaagagataatccagtatttgaatcctggtttcatctctgatctctttacgcaattcagaaagtccaagcaccctgattgcagagtctattgagttaacagatctccccaaacagacagcaagtcttttaatgggcataccacgtaggtaattatcaatcaggaagcttttttcttctttagtccatggcctcttgattgatgaggccattagtcaggctctttaggcagtttgcctgccatagcttgtagggtaaatacagcagcatccgaagcttcttcgtcagttaccaactccgggtcaatataaccattgctaccttcttggttaatgcgaagttcactcaggttatctaaccaggtttgaatttcagctaaaccagcattgaccatctgttcagttggttcagtccagagtttttctagctgatcgatacgatccagcaagactgtgatcattgctggtgaagtgagttcacgccactgactgatagctgtaacacgctcatccagtttcatggtttgagtactcaatgcctgttcagctactggaagcagcttacggaggtcatgcataacatctttaactactggtttcatatgattgatcctttattaaccccaatgctttccatcgttttacgacgtttaaacattgcgattgcttctgcatgtttttcacggaattctacgacctgctctgaagataccgaagtgggtacatcattcgcactggttaccattgatctgatagtttcatgcatagcttcaggcagaaggacataaaagtcagatagactgccactattagctacaagatccctcagaaggtattcgtagtaattaccctcaagttcttccatttggcgtaattggtcataccgttcgtcaaaggcttcacataatgaggggtgtagttgaattacaggcacatcacccaacacagttgggtaattatcaccatttctggtgaagtacttagatcctgttaaaactatgtgcttaggcactatttcttcaactacccaaaccataaactctgttttggctttatcaaacatagactgtttgaaataccgacaaagaagatccatttcagtggtcttaattatcatggtatgtctccggtaagtactacctgcaaacgagcacgagaaatggctacgtagagcagtcgtcttaactgatcgatatcccgacaacggttgaggtcacctaagtccacatagacacgcctgaaggtagaaccttgggctttatggatagtgcatccgaacactggacgtaaatcgatccaggtacttttaaccttatccaaggcatttttgatcttagtgaactcttcaggattttctgcgaaaaccatttcctgaagctttttggagaaacgcctgagtagcttatctttagcctttttatcattgggcatgaaataagcttgaaccggctcacctgatttaaaatcttttgaacctttacggttacggtcggtataaacccagtgaccttcttcacccagctgtttacctggttctaaaccagtaaggtaaacgaggcggtctgtgccgatagcaggcaggacatttttgatgccacctacatagctgttacagatcgcatagtcaccttctctgagtatttgagaaccagtaacctgagaataaatcttatggtttacttcgttcacacgcttattggtaaaggccaggaatttgctggtggagtattcccattcatcacgggacatatccctgatcatccctgcttcgaacttactacgttctacccagatgatgttcttaccatccacattgcatggaggagtagggccaccttcaagtacccattgacgcagacgcttagatagtgcctgtacagggttatcgtcagcttgtcgcatgatctgggttagttcgatcatggggaagcggccttcttcgaatacaggcaagtcaccttcagcagtcttacattgggctttgtcgcccatgaagactactttggtgccattacccagcttcatatagatatgctctaacaaggtcatatcaatgtagctggcttcatctacgaagacataggtgccgaacagcagttccatgggtttatgggataccagtacatccttataggttactggatcttcttccatacccagtcgaagcaagctgtgaattgtcttggcagagcaacccatagcatgttcgaaagcttcagcagccttattggtggtagctgtaaattcgacacgaggattacgctgtactttaatccccagtgcttccattgtcttctgtactttttccagatggtcaagtacatacttaatgacggtggttttccctgtaccagcagcaccagataagaccattacctgattactgttgaataccatggggtcttcatccccctgaaatcgggggacgatgatgtcatgaggttgatgtttgttaagcagaaagtccgtgatgaattcacaggctttctgttggccttgggatagctgcataaatgctcctggttaagggggcttctatacaagcccttccattgtaaagtgaaccactttgccaaattttggtacaaagttcgggttatcataaacgaaccagattacaggacgtttaggatctaccagattgtgctggctgaggtaaccatcagtcaggatgaacatccccagtgatgctttatcacgggcgaagtcttcgatggtactgtcgatacaagtaccgccaccaccactgaatttaacattgagcagatcacgtactgtacagatccgagagatatccttgatatcagtatcaaactgatacagctttatctcatctggtttaaacagtttcagtacctgatagacaccacctaagaagatggtgaactctttcttgccaatggaaccagatacgtcaatagcccatgaaatacgtcccagggacttaccacgacgttctggagcagtgatatcgtgcaccagcatacgacgacgaagacgtgaccaggtacgaccaggcttacgtgtgaccttctcacagaagatcttcagatagtgctgccatggaattgggggattcaggagatcctcaatacggcgagccatatccttagtaccacgaccaaactgtttaccagtctggtttgcttcagccatttcagctgccatgttagcacccaataggatgctatcaatttgctgtttctggctttcctgttcttcttgagtcaggggctgtttattgaaatcaggcatagggttcttacccttatgagtgcctggtttcttagcctcttcctgttgaagaatccggtatacctgcatggtggtcatgccatcaaagcgggaatccaccaataccttaatagttgtaggcattggcatccccgactttttcagttccaggttgattacatagtcaccagcctggttccacagatcttcatccagatcgacagggaaagtagtgcagtgttcatgcacaatatgcccaacttcatgagccaccacaaaagggtgttcagcaggtttgagcatttccatgaatttctggttgtaatacacggttaaagaatccgtgtaagcagaatcacaagggtgcccagcgggcacttccttatgttttaatctgaggatcattgaagcccagaacacatacttctcatccaaagccagagtagtaaaggctttgtcgaggatcttctcaagtggtgacattgtaattccttagaaaagttcgtcagcgtgacgctcacaccatgcactcacctcgacgttaccaccgagtttagggttacgtgcaatgatgctacgcattgagatcacctggtaggacgctggcatacgctcaatgaaggtcattgctttagcaatgttatcttcagctacaccacgagccagtacaccagtcagtgcatacatccaggatggttcgttagtcgggatacgggcaccttcaggatctttgagaatctgttccatagttactactttggagaagtaagtaacgaaggtacggaaactacgaccagtagctacacctacagtgccgtcgatcatcggttcccagccttcaatagattccagcggggtgatgagtttagacagcatagaccaggtacgagcacacgcatgggtatactcgttggcatctgggttgaatttgttgaatgcatctggttcgtagttgaggaatgccacaatacgaggatccagggttgcagtgaacagcttcagccagtacttcaggttttctttgatagtcaggttgaccacacgagaacccagagcagtacccagagaggatgcaattgcaccatcgtcttcacggttaccagcagccatgatccacatacgtttgtgtacgtgtttctggcctactttcttgtccagaatgaacttgtagcttgcagctttggtgtcgtcagcagcagaggtcagttcgtccagcagtaccaggaaaccagcatactgcttgcctgttttagggttaactgggataggatcgccttccagggggatttcatccaaagggatatatttacccttggttttgtcatcgttgaagcccagtacgccattcatgtctactggttccataccagccagacgaaggtcgatcagcagcaggttgtaagtatcagctacttcctgcgcaatagaggatttaccgaagccaggagcaccatacagcataggtacaagaccctgcttcatgatgtgggctacggtgttagcagctttggaaatgtcgagcggagttgttagagtcgttgccatgttagatagtctctactttagatgcggtgaatttaatacggtcgcctaagctaccatcttgattgatcatgtaaccaatacccttgccaccttgggcaaggatcttgtttgatacagcagacattacctgagcagtaatgacttgaggatccatgatgggtacaccatcaaggatcacttgaacagtaatttctggggtagtgtcagtagtgacaccgattgctaatgcaacatcgaacatgtgaattccttagcaggagcaggagaagaagttaggtttattaacttcagtaaggtcacggttaagcaatacagacattgcttcccagaattcttcagaaggacgttcaccttccatagatgaaccacctaccagatagttccagcctgagggatcttccaggtttaccttacctgtatcaaagagatcatcagcagtaaattggtcatcatagtcagataactcacgggcgtactcttctaagtactcccacgctttacctaactcagtaccaatagctacatgggttttacgttcagcatcactgagatcatcccatgctttgggcactgctacttcatggctggtttcacgagagtcagggaaatcaggatgttcccaaacgtggcgaagagaagtgatctgacgaggcatcaccactaaccagaaacgttgaccgggaagtactttgctttccaggaacgggtctacaatgcccagagccttgataccgttacgcttggtagattggtatgccttaccgtctttgatgccaatgatggcacctacagccagttgttcacctgcttccactggttcaacacccagatggatagcatcacgtttttcatcgtgttggtggatcatgcccagagtttccagagcatcagtatggggagtacgtttgtcgttatgggacatgattaattccttaataggtttatgagtgacattcacaaacctggcttacatgaaaccaggtttaggaagttacttaacgggtacaaaaggtgtagcagcgcctggaatcattgtggtaggcaatacaccgttccacttgttgattgcttccagttccattacaccagggttttcacgcagcgcatcaccgcgtaatttgatggcatcagcttctgctttcgctttcagcaccacagcatccgcttcgccacgagcttgctcacgagccatgtttgcttcagcaatacgttgctgcacttcctgctcgcgttgcagtgtcttttgagtagcttcaactttagcgttaatagcacgcttgacgttatccgggtattcaggagcacctacccaggaaattgccataatgtcgataccgactggttccatctcttgtttcactgcattagctacgctgtccagcagacgagatttaccaccatcaataaacttgtcagtattgatgaggttaccctgacggttcaggatatccgcaatacgttgacgaaggtcttgatcggtaatttcatccacacctttacggtaggtctggaagatcgttacaactttggttggattaaccttatagctgatcgccagctggtgtccgatctgagtaccatcagacagctggaaataaaacttatcttcataagttttcatctgcttgaaggttgggaacgtgtacaggtcttcgttccagccgatccagtaacggcctacgcctttgacttcttgatcgacacccttctcgtcaccgagacggttaacgatgatacccacgttacctggttcgacacgctcatagcagcctgtcagcgaggtcattgcaacgactgccagaatgcagcccatgataaatttacgcatgtttgatcttctttttgatttgacgataaacgaaagtgaccaccagagcaggccacaccagagcaccagcaatgccgatgatcacgaggatggtatctttagctgataccaatgaaggcaatatgcctccatacaggacacctgacagaagtaagatcactactccatataggtatagtttcagatatttattcatctgttttgcgattccttaaaccagggattgtataggctttggagatgtattccccaatgtagaaatactcatgaatttcactttcgatcatgcgtacttcagagcctgcatcagtcagtactgtgtaacagggttctggtttaaagtcggcaatgctcgccaatgtgaatccgattttggtaatgaaagcattacctaatcgacggccatcttttgtgcatagctgacgatgtaattccagagtcccggagggatcgtagcgttcagcccattcaggaaggacttcacgtttaaactgctcgtcataatcttcgcttgtcatgaagcctcctttagggctttgtcacgccgcttacagttttctttctggcttaccatttccaaatgtgccgggttacagcacaagcgattacgacacttatggtctatctgcttcttggatgggatatagccgtagaagtgggtatatacaacgaggtgagtagctacagtttggctattgagactcatacgcccatagcctccaccacgtccagtccctgaatcagggccagtccatatgaagcaagggcttggtaagccttcaagtttaaagccaagatctttgatatctactcgttcaaatacacgggcaagaacttcctccctacggttgggaagttcctccagtatcttgtcgagcattgagcatctctttgatcagggtattgtggtagcacatgacagcagcatgtacttcgttaggggagcagccatacagactggctttagcacgattcattgcatcgtccagactgtcggctgtagggtagaggctattaactactggcttcatcttttccataatagcgtttttgcagttcgttcatccccacctgaagcagatacatcagatcttcatcttccaggtgttggacgtaggttaatgggttaatggaatcgactacttctttagccttttccagtgattttttagcagccagaatggcagcagtatcctgagctactttcaaatactctgtaggagtcagcttaggctttgctggtttaacttctgggttaccccagacattttcaccagaggccatgagggcatggatccgttcttccagcttgccgtagtccataggaggtacttgagggtacatataggcacgggaagccagaattgcagggttatgggacaactgacgtttagtaggtgacagatgcagggcagcatcaaattcaccgttctggtttgcagcacggagaataccccgtacagtttccagtttaaccccggatactgcggagatctgatgcatacagtagccttcgcgagccatagccagaagttcagcagagttgatagctgtcatttggattccttattttctaactttttcaataagcactcagcatcattaatgtcgagtactgcgttttttactttattagacaagtgagctaattccctgttgggaggattaaactcacaagccttttgaagaagctcatctttgtaagtagtgagtagcttcttcatcagagcaatttctgactttttcaaaaagtcccccacactttaggattgattaaatactgttcccagaccttatcgaaatagcagttgtctggggcatttttgaacataggagcaacatcgctgtcttttaagccagcaagaccacatcccacacgagtaaccatgaaattcagttcaccatgatcccgtgcataagccagaaaggtatccacgtattcatggatcacctgtccacgtagagtacgtaagccaggagacttagtaggcagggcatagctattgccatagtgaccatgacctttaccccatacagccccataaagctgtagggctgttttagcagcaccatcaccatggatacctgcttcattggatccgaatacgaataccattggtttgccttcaaggcagcgttgaatagtcacttcgactgtctccattggaagaatttcacggtgcggaggggatttataaatattaataccgtcttcccagtgcataccccatttaccttgccgccatagagttagtgtgtgtttagcacttttattagtctccagtagccgaggtgttcctctgaatcctggttcatgctttgtatatgagttgctttgatttatggatcggcattcaggaaggtaggcatggtctgctggattacggttgatccaccatgtcttcattactggtttccttattcaggttgtattgattgatgaattcacgacgaagttcttgcagacgagctacctcagcttctgctttatcgatagcttcgtcgaagtctttcatcgtttcattgattttgtctttatccattgtacatacagctccagataagggcacagatgaacgctgagattccccagaacccgtgccacatttgttgacggtgaagttttgcctcataaccgcagaggcgtagatgtgctttaactgtctgggtagcttcgtactcgtactcagctttttccagttcagcttttgagatccttaccaggtgtgtccaccatataaagttgatacagcaaatggctaaagcaattaatacatagatcataagagcctctttaggacataggttaagactgtcttaaaccccgttagcctatagtttactttagtcaaaatggggatttttagtaaatttataatacaggttgaaagcgtactagtagtactaagaagtactactggaacactctgaactactgatcttaaggtatgaaaaagcccactacattgagtgggccatttcgagtatgccttgttttgtcgctatctacacatccctcgaatgtgcgctggtcgagtcttcagactcactagcaggatcgccgttacgggcgtttgaacgagtaacgagactgtctctgatacaaggcggtacagaaacagtagcgacaagataaaccacatgaattgcttcatagttcctcctgcctaggtgattaacactatgtgaatcacactggtttgtaaagatacaaagcactgtaatccaatgaaaatgtggggagactagctcccctgccaaaggcatagataagaattaagtgatggtaatgagtcgagcgactcacagaagtgaccggaggtcacaaaggcttaagcccacttcagcatatacttatggaagttttctacagtgagtgcacataaaataatatgtgctgcacctattccgcctttctgctctttaagaaactcaatatgttttgagatgtcagttagggcttgaacaccactaccatctactgtgcctttggttgggtagtacatgagcttaccagcccagaatactgatttaactgctacatgcccttgagtaggcacttctgctgtaaaaccagggaatttattaatgaaatctgctgcttcaggtgcgttcataggatcctctttaccgttgacggaaacactcgcaaagatgcccggagggcatcaaagcttagtattttcgctatatattttattgaagaagttaaaagcatcagctatgtcagacgtacttttaggttcctgtatagaccgatcatcgataaattgtttagggttgtttatttcctgtcttctaagcacttcctctatcatcttacgttgaaagtcgcgcatagaggcatagccaggttgctcgtcattgcctggtttccaatagatccaacctaatggggcagattctaagtccattacaattcctgggatggaatttttatgtatgacttcaaattgcccctctactgctgcaatgacagtaactggtttcagctccagctcttgtatgcctatggcattagctgttttgattctgttaacagtgccttttggcaccatgtattttatcgtgtccatattgcattccactgtttaaatgctactgtttcgcccatgatcacttggtacttttgcaaagtttcccatgtagcaaattctttgggtaaatcctcttcgttgtaggatcctaactcacaaccaataggtaagactatttcagcctctgtgagtcctacagcacttctggttttaaccagtctatacagagcaactggtatcaccacttgtgggtacacataccctgttacggccatttagcctcccatatgatcatgttggttttcaggcttctgtgggcactacagtgggttcctggaggtacaccttggggtaatgtaggattcattggatcatcatagcgaatttccaatcgtgcctctttaagcccaatagctgctctggttttgattaacttaatcagctccagtggtacataacgagcactaggggtgttgtaagtagccatagtattccttaaaaaaataaacctaccccgaagggtaggcgtttggttagcttaatgcatagttggaaccacggattttatccccgaggttgttagacagcttggtatacacaccgtcagtggtttgatacagctggttcatcagggattgcagaatagtgctatcagcgaattctgccagcatctctttgtaccagtatcgtacttcgttacagttgtttggatgtgaaccaaaggcatcatgaacagtagccacagggaatggtttgtaggtcaacatgaagttaactttacgcattacatcacgagctaagtcgataggtaactgcatgtagttgctccagttgatatcattgagaataaccatagaagactgcttattctcattccacagacggatacgacgtaccatatcaccagtagcttcttcagcctgcatacccatgctattagccagcagacgagcttccagcatcttcaggacttcagccaccagctctgggttatagttgcacagacgctccagctcacgcagtaaataggcatcacagcagtggatggtattggctacgttagcacggcctttctctgtaccccggttctctttgtattccatggtgaaagtagcgtgatcaagctcatctacttcaattctggtttccagagtttccatgactttcatcttagcgatgaagccatcaggcagctccagaacgtgttccagagcataaggacgccatgaacccaggagttcatccatgaggttgaacgcaccaggagcgatgatgtgggctgcttcgtagaagtagtccagcatctcgccctcaccgaataccttcttaggcacagccttagaaccgtaaccagaggtcattacagcttgtttgatatggctacgaggtacttggatactatccagacctttacgcttcagaacgccattcatggcctctgtggtgttgctgtaggcatccatacgcttctctgggtcaatacaaccagtgttatatgcacccttctcacagcctgtgagggcactcataatctgaatgccagagcagcagccatcccagtaggtgatgttacctacagcttctccacgctgtacacgacgtaaggtcattacagctttatggtacagttcaggtgtttcagcatcctgaaccttgctttccagatccttgatgttgtcatacacccactgaatacgttcttcgaacagtttcttgtccagtccgtaatagttggctacgtcgatgcacatgtattcccaaccagacatatatttgaagtttgggccataagcagtgttgattaccattagttaagtctctctatttaaagtttaaattcatcaggcacaccagttacttgctctttattggcaaagtttaaactggctttcttgaagggagtgccttgaaggttgatgtgataaccctgggtgtacagacgtccacgtttgtcaggtttattgccaaagtagaacttattaccctggtttaccatcaggctatagaagtagtacgactgacgtttataacgcatccagttgtctttctgtttacgtaccagatcagccttctcccacggtgtgagaggtttcttacggtgcttctggagcttctcctcatcgatctcattgagatcaaatgtaggttcttcctcgtagttacagaggaattctacgtccagagagtaaggcacagcattacggctgttgattacatccagacagatatcctcgttatggtgattgaatgatccccctagaataaggctatcagatgaataagtaaggtaaggagtatccatgttatgggtaagcttcttgggtgggcaaaccagtggtggtagataacacgaacgctcaatgaattgagccagctggtcaggcaacccaatattgctaacgatatacagagatgctttaggatgaggcttgttaatgtcatatacgtcagtatccgtgaggacagcaacgatttcagccatagtctgaatgctgtcacgtttatcgtcgaaacccagtctggaagccagctggcctactacgttgaccattggagtaggttcagggaagtacatgattcccacgaacacttctttcacaatagcttccagatcaagggatttgaggtggttaaggcgtacagctttagagtcataatactgaccttcaagccactggtttaacagagatacaccctgttctaccttgtctaacaggttgcaatcagggtcttcaaacagctctttacgaatataaccatcaatatgtttcttgttgaactgacgttcgttgatggcctgaagttcctcaactggtaaccatttatgttgcattacaatcttccccatgtttgatagtcagcttctgtcatgtggtcatccacttcttctctggctttagccacttcagcattctcagctgcacgagtcctgttaggatcagtatcctcaatgaggtgtttatgttcagtacatgcatagtgcttgtaggtatctcgcataccaaatctgggagcatatttgctcatccagttagctacacgtttaacaccattagctttgcaaaacttacagtaagtatgtaattttgctggtttaagttcagtagccattatagattcctcgtattagacgtaattgccattcacagccaggttcatcgatcctgtcagctattattcttggtttaaatctggataccccttcagggtagtgagcagtattaagcctgtactcactgttggttttatacttacccaacactcccggaagccttagtaaaggttccttaatacccagcatatattgggtacgtaactgcttaatccacgactcttcaaggacgatatatacatgcccatcaaagccagaagtaatgctcttgcctacaagggcttcccatgaatcattcaagatagaactcctcaatgaaatagcccagcacgaggctgggcatatggattacagttcgaagttttccagtgctttggcatcaccaaaggtgattaccagacgctcacccagggcttctacgccctgtgcacgcaggaactccagcactgcaccttcaaccggatggtcttcacgcagagcgatgccacggccaccctggcccagacgacgaacctgaccatcacggcctttgacgccgatgttcagatagccaccaacgttacgctcagcaggagcagcagcgttgttagcagaggaattggaagtgttgtttgcagcagtgtttttctgataagccatgataaatacctcgatagttaatatgaaatgaagaacgaacaggcaggattgcctttgcattcattgccctgtgggcaatgtcttaaataagaaagatggaagcaaggacagcttcatattcggcatattctgccggatcagtgttaatgagagcttcgtactcacgcagagtatcaacgcagtcttcagtgagttcttcagctataatattaagtgcttcagcctcacctaaatgagcacacagataacttacagcacgcataaatagcttcagtgctaactcaaccatgccaccttcataagccagttggcattgttccagagtaatatttacatcgatcatgagaatgagatccgttgttcaaggatgacaggaactccaatggctactttagccatcagagatttaatttcacgcatatccactttgatagtgaagttctttttatgcatacccattaatgtagctgggaagtccaccactgcaatacgtgggaacttctccagtgctacattgaatttagtaatagtgatagtggcattgatgccaatgttgaagtcactataataagatatagtaccttcacccagcatcttagaatgccagttaaatacttggttagaagtagtcattgtccagtctctccagacatagatactgacctttgcttataatagcgtactcagtatcattgagaattagatagtcttgagtccccagatttctgctaccatcacgcatcttgtttagtagtcttatgtcctctggtttaataccaatggctagtttagtttgaatagttttagcttcagcttcatctaccctaaccatcattgagggatgaatatccccaaatacagcatagtagctcatattacccccatactgatattaaccagtcatactcctcctgggttaatacaggtttatattgctcaattacattgagtgcattgttgaagttctcattacagaagaatgagatgattgcaaagtatttcaccagtctatctccttaaggtagaagccttcatcatctttataaagacgaaagtctttattactaataaagactcttgtagcaacaattaccttttcgcccattttaatacgtactttggatacgtgaacccttggttcaacaataccaatactacgttgcactttaactttcttaagttcattatctgatattgaatagataaatggttgtttacctacattttcttcccaaaaacgtctatcatttttggtagagctactaagttctattaacataattacaccttgggtaattgttgcatacttgtaggaggcgaagaccaacgaccactgactacacctgtgagtctttctttgggtacatacttcttaaattcccacttacagtgtttattaaggaatacttcataccctttaaacagttcgtcagtatcattacgatcactggcaatgtttctctggttcttacgtttaatacgtgaaccatcgatacagtacccatcaagagtacagccaatggctaaagccatctttacctttttcaaccatgcatcagttgtacgaatatgaatacacttctgcatagctggtgcatagacatagattattttactcatagtaatgttcccatagtaaatagaggattaagataaaaccagatatgtaagcgagtaataacatattcatttattgtcctgtggacaatatacctcccaatctgtatgtttttgagttagaaagttttctactgtatctgtataggtatccccattagagaatctaacaaatatttctcctctttggttcagtgttagtagtgttccactattccatagaggtctacgtattacagcccctagtttcagcattaataatgcttctttagaagtcatacaatgtaccaattgtgagagtcatcgaatataattgtgaatttactcactggagtaaatatcctggaattattatcactacagtaaatatagtctcctttgatgtagtaataaagatcttgtttcatccagtcagctctgattttacatccgatcttcattgctaacagggcttcctgagtcgtcatacaatttccactccataccttcgtattcttcgataaacttattaacattacatactagattactgaaacttaaagtggtacatacataacgaatagagctatcctgtatttcataataagcatcaaagtcctcccatttagtgggaacaaccttgcaacctattttcattgcaagtagtgcttcagctgttgtcattgaataactcccaaccgtctatgtcaccatagcaaggtatatagtcttcgagttccagatgaggagtaccatcctcattgatagtaagattatcaatggggtcatattctacccattcacctggattccatgagtcccttcgtactttgcatcctagtttaagggctagtattgcttccttggttttcatgatatatctcccaataccctataccagcaggtattaagtgttccaaactatctaaaggtataaatgggctttgacgctcactaaatagtgtagagcctactaaatagatataagcacctggcccccagcggctatgacggattttacatcctatagctaatgctgttttaagttcctttactgttgtcagattactcatcccctgtctccagtagatcgattcacaagagtgttcggagaacacgttaataaactaagccctccagtgagggctattgtttagtaggtatattcaatacgtttccaatgctcaaggttgagcacaccaccatctttgatatgtttgagcatagtaagcagtaatgaatacagcttatccttctcacctttaatctctgatttaacgtgatagaactcttcacccatgatggttatttcaatacgattgacataccactgatggcctaaatgatcttgaatcagtctacgagtgatatgtggatatgatgcttctttgatagctttacggtgtagctctaattcaagatccatagttatacctctggtttaatagcagaaccaggcaccacatgatttacatacggcaccaccaccatgacctgatccaacattaagatgaatgcaatcagcatcaccctgccataggtcatgattctttttatatgtttcaataatgtcagagaatccacttacgtagttctctttatcatcagtaagatctacatactgaaacatatcttcaccaataccctgtatccactcaatagcctgagctacagtttcaaactctttatagttctcgaaagtatcaattaactgatagttgatagttaccatgattacacctctggtttaatgggttgggattactaaagtattatgaccagcaaagctgactttattactatctttgatgagcacacagttatggttatcaccatcttctgtagctttctgccatacattacggtcaccatatgcccatgtctgggcaaacatgaactgagcaccatcttctaattcgtcgaatttaagtacttgcatggtttaatcctctaagtcagatacgatttcttcaacttggcttaatgttaattccagctcacaccagatttcacaggcatccatgcctgatttcatcatggattctatgtaggctcttaaagcactagcatagttagcacgggcttcatcattcatgatgacctcacacacatttacggtaggcagacacaaggagtcctattaacagggctatgctgatataaccattagcaccatgatagagtgctgcttggataactactgttgcagcgaaaacgtgcagtgcgaagataaatgacttggacatagttagtactccaataggttaactgaatacttctatacattaccctgtgggtaataccactaatgttattgtggttataggtacacatgtttctatagagtataggtgtgattaggtatgaggtaggtggatgatgaggtatagggagagtatagagaagatactaaagtaactgtacgtagtaatttgacactcaattccctctatttcctgtatagggatgatgagtgattaggttatcggagtgccccagcaaccgggagcacggagataactggtgattctacatagaatagatctatagctatgtgatgactggagtgggttaagtaagggattgtgttaagggattgagtgagatagtaacactgtgtcaagtggtttgtcttagaacatttagttataagcatattccagatgtgcatatagatttatctggactggcttatcagtaacttatctgtatacaggaagtagtacagagttagtctgacatacgccagagagtaagtttgccacaagttttgaaacggaggagcgcacctgtactgtcatgtagcacagtgtgtattgtgtatgatgtgtattgtgtatgaattaaatagctcacccgaaggtgagcttagttttacttctcgtcgttcagtgatacaccaagtgcagccagctgattctccagctgcttcttagtgctgatgtattcagctttatccttcagctctaccatctcactgaagcgcttggctttgttatctgctacttcagccagacgtttaccagctgatgcaagcagaccagcagtatcaatggtatcagtgacagccttggttgctgagtcgtacactgcgcgaatacccatggtttaattcctcttagctaagttatgaatgcatcattgcatccaatcaatgagcgtgctcagagatgtgtaagaggaatggtaatggacatgagtaagaattcttttttagcgttcagctccgggggtagattcccctctgtgtatgagccaggtagtaagtactacactcatacccaaattagcgaaaattctatatagcgtgaaagcgtatcaattataggtgaaatagcacttttactattgcacctgctactatccctactacagctacgcctataacatcccctataaagctgggtaaaaggtagctaaaactgtagtacttaaggcagttaaaccagtagaaacctaacagcagagatgtagcaactatgtagataattatgaagattttcattttctgtacccaaattagaaaaaattcccctatgcaaaagttgaaagcgaatgcacctatatcttgcttatgttttaactctcatatataaaatatataaatttcactataggcgggtaaggttatgcaaccacatgagcagcgagtcgttgatgaacagtcagagttagaaggtaaactccataagttaagtgagtttaccaagaccagtacttttgagcttctggctacggaagagaagactctgttgcgtatgcagcttgaagtaatgcgtacttacagttctattcttggtttacgcattgccaacttcaagtaagacaagaggggcttaacgcccctttgttttaattaaaagtaaatgtattcaatgagcataggcacagtaacagtgtctgtctgccctgggtagttacctgctttaagtttcacagtttcataaacagacgtcacactgatatccgctaacacatagtgaataccctttagtttcttattcttatctggtgggttattaccatcgatctgactcatggtaataatgttagacatagctttagctatgagttcttgggtaaaagcaagggtgccatcatgtgagcaagaggcagtaagcttaacagcattgggatcatcgaccactttggggtcatatttcatatgagggatagtgtcaatatccactttgtccccatagtttttaagcatccagtcacggacaggtactacagttgtgatctttttcattttaaattcctagtatgttaaggcggggatggtttacctaagttaacctatagattaaactccagatattaactggaggtgcttatgtcaaagattacgctagaagagtttaagaatgcattgccgagtaacctgggtaagaatgccagtgttaagctggtggataagattaacgatatcctgaataatgaccctggttttgcagagcagtatgcacacaatctctttcagtacaccaatgtactgtctaatggtaaatacaaactcagtaactatgtggaagctgtgcagtttgtaagttacctgtctatgggtatgtcaaaccaggatgcctggattaagactttccctgatcgctataaatattatctgagtaaaggactgtcttcgaaggaggtcagtgcttatgtcagtatgtactctaactctaaactggtatccagccttaaagaggtagcgtatattcctgttcatattatgtacaggcatgtattccatgatgctgtgatgcatcaggcattgctcatgaagactgccaccagcgagaaggtacagagtgatgcagctactgcattgatgaactatctgcggcctcctgaagctaagaaggtggagctggatgtttctgtgaagcaggataccaccctaaccgagctgagacaggttatggaaggtttgagccgtgaacagcaacaagtcatcgccagtggtatgagaacagccaaggagattgctgagggccgtattatcgaaggtgaggtaatcggcgatgatgattgaccaatggtatgcctggttatttctaacatacctcatgtgctggatagcagtgattatattgccacgtaagaagcgcccagcactgggagaggagaaaggatatgagtaatatttttgacgttgaacagccaaagaaaacggtaatagattggctaaacggggtgtcttatgcagaagatcctacgtataagccgagtctgtttgctttgcagttcgttaactttatcaagctggtcaatggtggtcagggcgaggagcataagactccggtgcttcattacaaaatgctggacactgttgtatcgggtgatcggcgtattgctaatatggtacaccgtggtgctgctaaaactactgtgatggctgagtacctgttcttgtacttgggtgtgtttggtagtctgcccgagtttggtcgtattgagttggccctgtatgtttctgactccgtggataacggtgtaaagaacatgcgtaagaacttagaattccgttgggaaaactcagactttctgaagcgaatgatccctaaagccaagtttacggatattcgttgggagtttaccaacctggaagggcaaaccacagtaatcaaaggctatggtgctaagacgggcgtccgtggtacgaaagagatgggtaaacgtcctaagctggcgatccttgatgacctggtatcggatgaagatgcacgttcccctaccatcattgctgctatcgaagatacagtatacaaggcagtagagtacgcattgcacccatccaacaacatgatgatctggtctggtactccctttaacgcgggtgatccactgtataaagcagttgagtccggggcatggactgtcaacgtctacccggtgtgcgagaggttcccctgtgaggaatcagagttcaggggtagctggcctgaccgttttgattatcgttatgtcaaacagcagtatgagaaggcattactgggtggcaagattgccatgttcaaccaggaactgatgcttaagatcatgtcagatgaagatcgcctgatcgctgatggggatattcgttactactcgcgtgctgccctgttgaagaacaagagcaactacaacttctacatcaccactgactttgctaccagtgacaagcagtctgctgacttctctgttatctctgtgtgggcactgaacaataacggtgactggttctacgtggatggtatctgcgaacgtcaacacatgggacagaacatcagagaattgttccgtctggtttctcagtacaatccacaggaagttggtattgaagttactggtcagcaatctggttttattccatggattattgaacagcagatcgataagaacgtattctttaatctggcttccagtaataactcaagccagccgggtattcgccctaccactgataagctgcaacgctttaacgtagtggtgccctggtttaaagctgggaagatgtacttcccttcagaactgagaaccagtaaggcaatgattgagatgatggaagaacttcgtcttgcatccttgggtggcttcaaatccaaacatgatgatgcgatcgataccatttctcagttggcactgttgaaaacctttaagccaggaacagctgcgcctgtatactacaacgaagagaaagacgtgtggtttgagccagacgttgaagtagatactcgactcagtagctatctggtttaaggatcctgtatgaaactgaaattatcagatgtgttagagaacttggcagcgggtgagttatctcacctctccttgtttgagaatggggcggatatcccatttgaaacttttaataaacgactgttgcccattatcaatgctggtttaactgatatccatatgcgtttctttgtgaaacagaaagagatatggctcaagcattgttgtggggatactaagctggtactggatagaaagaatgcagtgtctgcccacaagcttcgtggcaatgctttcattcaggactgcgatgatccctttaaggatgatgtggtagagatcctctctatctataaccaggacggacaacaatacccgctgaacatggacacagaccacacccagccgagaggctgtgggtgtggacgtggacatgaatgcaactgtacaccaccaaactcatgggcacgatatgacagcaccctggactacccggcaaccatcaccaccagaaccccctatggcagctatggtagttgtgggcctggcttgcctgtgctgtatactcctgctgttaatgtgatcagactgcctgagaatatgccttctggtttcatgaaggtattctataaagctgcacctgcccgtatccctaagctggaggataatggggtaactacttatgatcgtatcgatctggatttaccctttacttatctggatgcactggtttactacatctcatctcgactgactgcacctaccaatggtggactacagacagggactaatgagactactcagtactacaataagtatctgtctgcttgtgcagtgcttactgatcaaggggtggatgtatctactcagggatctggttacagcaggtttgctaagtcagacttcaggtaaaaataaagccccttaaccggggcttttctttactccagggagtcagcagagtactcaaggaaccaggacttacaggttcgttttgtgaacactgtattatttacatcagggaatgccatggcataaagctgtttttcaatgtcaatgagctgatcatcagtaacatctgagttacggggaagattatgcttgatgtagcttgatacaatagtacccccaggttcaatacagaactgtaaagtggaaatcccattgcctttacgtaaagcttctacaatacgtttaccagacagggcagaggtacgtgtatcttcaaactcatggctgagtaacagatctactttttggagcatatgatccatatcatcagactgcgctaacacatgctgtgcagcattcaaaatagtattgaggatagggccatcaggcatgtcgattaatttcatttctggttttcctcgaacattttctgcttcaggagataaccttctttctcccagatcttttcgaaggcattatcataggcttccttccgaccaatagcttcattgtaacgggaaggatccacacaggcagaagtgccttcaaccttgaaaccattctccatgatgatgatacagatggttaccagattgagttctgcgagatcacgatcagtgtatccgccattgctggttttaatggcttcaccagcattgatgaagtacacaccacggatcttggcttcgatactggatttacttacggtagtcataaggattcctcagataaagaaaagcccctccgaagaggggcatcctaagcattttacgtctgctagacgaggctggcggatatactcagagccactgactgcttcagcaagcatgggttgatagcccggcaacatagagttatccaacggtcttccggtagcgagtcggaagttggttgaagtgggagtcctagtcctgtatgggatcacttctgatacattggcagctatcgcgcgattcgcacttccgatcagaagacttaccattacacttcaatttggccggagcatctggattcgaaccagagaatgtcggtatcaaagaccgatgccttaacctacttggctatgctccaatttggtgagagtgtcccctgtctcgtaggggcactaacgtatcagacttacactgacactactctcattatttggtggaaggtgaaggattcgaaccttcgggcgcatctctgcacctcctgatttcaagtcaggtacaatcggcctctctgacaaccttcctaaatttggtgggggaagatggagttgaaccacccgagcttcttaggcaacagatttacagtctgtcccgctacctctacggtctattcccccgaatttggtcaccacattaggattcgaacctaagacaccctgctcccaaagcaggtgctctaccagactgagctatgcagtgttattaggtgaagggttgcctgtgtcaccaggctggctgttctgtccacttaaggcttgcagcaggaacaccatggcttctcaccattgatcctctcacgactgagacacccttcataatttggcggtactaccgggaatcgaacccggctctttcccgtgacaggggaatattcttaccgatgaactatagtaccaaatttggcgatgggactgggactcgaacccagctatcatagattaacagtctaccgcttcaccgtttagctatcccatcttatttataaaaacactcttgaatatctttataaataagcccctgtaaagtaggggctactccgagttcggtaacctggttctggttccagggtactccagcttttagacctttgtacatgacaggacactgcctgtattctgaaatacctttgttggggtatggcaacagaatcaacatcgcaacgcgctgcttctgttctaaatacactcgtaaatgtatttaaaaaagaagccccggcgaaccagggctaaagcaggaatccaatccgaatcattcgctggatttagttatgccatagctacttagcttaggcaacacctacacccagttttttagcaactttctgcatgtgggcagcttgctcaggatcgtagtcagggaacagagtagaaaagtcaggttctttgaaggtgatcatgttcttaaggaatttaccttctgggtactccttaccatcaataacagtggttttagccactttgatgtaagcacgagggtattcaccttcaatggtgagttcatcatcaccaaagcccatagcccagtagtaagacagggcatcttctacttcatcctcatgacgaatgaatttagtcatgttggactcatgaaccagatcataaatcttatcagcatcgaagccagcaacatgagccagcccgtaagctacagtgagaatgtcaccgatagcatcagccagttggatcatatttactgggccaacatcagcattcgttaggcgtttctgcaaatgtacctgtaccatcatgtcaggattactggcttcaatggcttcaacagattcttcaaggcacagctttgcctgttttctgatagcattgacattaggattggagagatcgcctttagggttaccaaaagcaatattaagttcagctactttttcggcattggacttcatttgtatggcctctttctggtttaatacaacaaattattcactaaggttagaacactatgaacgatgaagatcagagcgtaagtgtagcttaccatgatcaacctgttggcatcgagacaggatggaagaatcctcctactctgtcgattcttaaacaggatctgaccaatgctacgcctattcatgatactcagaccgcgaagatagcggagtgggaacgctaccgtaaaggtaagacgactacccctaaaggtgaggggcaatctaaaattcagcctaagcttattcgtaagcaggctgaatggcgttatgctgctttgtctgagccattcttatctaccccagacttatacaacattaacccagtaacttgggaagatgttcctggtgctagacaaaacagtttaattcttaataaccaattccagacacagattgatcgtgttgctttcattgatgcctatgttcgtagtgcagtagatgatggtacgatcattgttcgtgttggctgggattttgaagaaagagaagttcctaaacaggagcctgtatactctttctcagttgctgctgacatgctagatatctatcaaaagatggcccaggttgagcaggaaaatcctgtatatctcttaaattatccccagcaattacaggatggttatgagattctcaaaagtacagggatcccctatgcactgactcctattggtgtagctaacactaccgagatgaagacaattaagaactgtcctacggtagaagtctgtgatttaaataacctgtatgtagacccttcttgtaagggtgacctggataacgctaagtttgttatctattcttttgagacgtcccttgcagaacttaaagcagatgggcgatacaagaacctggagcagatcaatgtctcgaacagttcacctctcactgagcaaaactatgaagcacctaatgaccccaacttccagccggagggtaaacctcgaaaaagaattgttgcttatgagtattggggatattgggatactgataattctggtttgttacgccctattgtagcaacctgggttaacggtgtattgatccgtctggaagagaaccctttcccggacaagaagattccgtttgtctcagttccttacctgcctgttaagaactctatctatggcgaaccagatgcagaattgctgaaggataaccaggatatcatcggtgcagtaaccaggggtatgattgacttgcttggtaagtcagctaactctcagactggttttgctaagaacatgctggatgaaaccaacaagcgtaaattccaacgtggtgatgattatgagtttaaccctggtacagatcctcgtgtaggtatccatactcacaccttccctgagatcccacagtctgctcagtttatgcttcagcttatgaacactgatgctgagtcactgactggggttaaatcattctctggggcagaaggtatttctggttctggtttaggtcaaacagctgctggtgtacgtggtgcactggatgctgcttctaaacgtgagcttggtatccttcgtcgcttgtccaatggactcattaagattggtcgtaagatcattgcaatgaatgctgagttcctggatgaggaaactgtggttcgtattactgaagatgagtttgtgcctattcgtcgtgatgacttgccaggtaactatgatcttcgtcttactatctctacagctgaggatgatcaggctaaagctcaacagcttgctttcatgctgcaaaccagtgctcagactcttggcccagacttcagtaagttgttccttgctgaaattgcacgtctgaacaagatgcctgatatggttcgtaagattgaacaataccagccacaacctgatccaatgcagcagatgatgcagcagaaacagcttgaactgcttcaggctcagattgatcttacccgtgctcaagctatggctgaaggtagcaaaggtcagcttaaccaagttaagcaaggtactgagatggctaaagctggccagatccagtctcagactgacaagaatagtctcgacttcttgcagacccagaatggtgttaaacatcagcaagctctggagatggagcaagttaaaggtgataccttacttgctgcccaagctcttaaacagcaaggcactctggatcagattcaggcacagcatcaatctggtttactccagcaacttgctaataccagactgaaccataatagccagctacagttgttaagggcacagagggatttaaatcctcctactcaaagcactggtaataactcgtaatttatttaaaactataggcaggaagggcaatttgttgtattgtcctcctgcttctttcatgaggtttctatgaacatcaataatctcgacaacgatataaaaaagtataagcaacaggtagcactgggtgaagctttagaacgtctggaagttaatccagattttcgtatgcttattgaactcaactatcttggtactcatgctttggatctggtttattcgcgtactcgtgatatgaccccagataatgaaatcgctcggaagattgatgctgtagctaccttcaagcaatatctggatgaagtaaaagataaccgggcaacggctactaaatctcttagagaagcagagcagacccgagatgaattttacgacgaggactaacccatgagtaattcaaatgagcaactagatccgaatgacatcttctccatgtctgaggatgaattaagcaaatttgatcctgaacaagcagcagcggaagctgatgccctggctaaccctgaagaaactactgaagaacatcaggaagaagttcctgagtctgaagaagaaacagaacagccagaggaagaaaccacccctgaaactgatcctgagcagccggaagaaacttctgataatccagaagacacagatcctaaagcacagcctcagaaacctgatcctgactccagcaacgaaaacgcaccggactacaaagcgttgtatgagcaaattgttggtaagcctttcaaggctaacggtcgtgacctcaccattaaatctgccgatgaagctgttaagctcatgcagatgggtgccaactaccatgagaagatggctgctctgaaaccagttcgccgtgttgctcagatgcttcagcaagccaatgcaatggatgaatccactgtggctttccttctggatcttcacaataagaaaccagaggcaattgcaaagctcgtcaaggacagcggtattgatctgtatgagttcgatgtggctcaggcagataactatcaaaccagctatcaagctccaactgatgttcagatgcagcttaatgacaccattgaaacattagctactcaacctggtttcactgagatgtttaatggcattgctcagagctgggatgatgcaagtcagaagttcattactgaaaacccaggtattttgggtgtgcttcaggaaatgaatacccgtggtgaatatcagcagatcatggatgaagttagtcgtcgtcggttgttccaaccagaactggcagcacaaccaatgcttcagttattccgtgatactgaagtacgtttacgtgaagctggtctgttaaaagctactgctactcctgaacaaatgcagcaggtacagcaagctcaagctccagctgttgctaccactactcagcttaaacagggcactgcctctcaaactgctcaagcacgtcgtgcagcagctgcacctcgtcaagctccacaaaccagtcaacgtaaattaactcctgaagatatcttttccctttctccagaagaatttgctaagattgacccaagcaaatttaattaagaggttactgacctatggttatgcaatataaggctcctgcccaaggtaaaccgtccagcgttggcccgcagattaatactgcgtattaccagcgtaaggcaatggaagatgctcagaaagagcagtacttcactcagctggcttctgccaaagccattccgtctaacttcggcaaaaagctgaagatgttccattacctgccgctgcttgatgatcgtaacatcaacgatcagggtatcgatgcaactggtgctaaaatcgctaatggtaacctgtatggttccagccgtgatatcggtactatcccggacaaattccctgtactgggtgaaaacggtggtcgtgttaaccgtgttggtactactcgtattgaactggaaggttctttcgagaagttcggtttcttcattgagtacacccgtgactctctgaacttcgataccgatgctgaactgctccagcacatcaaccgtgagatcatgattgctgcatctgacatgaacgaagatgccctgcaaatcgacctgatcaacaacgctggtactatcgtctatgcaggcgatgctaactctcgtgctgaactgggccaggatgacgtcctgtcttacagtaacttcatgaagctg

SEQ ID NO: 29 - DNA, 177441 bp, unidentified
  source 1..177441: mol_type = genomic DNA
ttatccataaggcaacgaaatgaatgtagaaaaacgagacggaacaatcgtcaaattcgataaagaaaaaattcgtaacgcggtgtataaggctggcggtacgatgacggatgaagacagcgcaattatgcttgtgttgcatagtcagatccgcaatgacaaaccaatgaaaatttcacgcatacaggaacttgttgaagaatctttaatgaagacaaatccgactgttgcccgtgcatatatcgaatatcgtcatgatcgtgatatcgcccgtgaacaaaacggaaaattattccgtgatatcaagggtttgatgactcttagtaacaaagaattaaccaacgaaaacgcaaacaaagattctcgcgtattcccgactaaacgcgatcttctggcgggtatcgtttctaaacacatggcgcgtaaccatattctaccgaaacatattgtagaggcgcatgattccggtgatattcattatcacgatctggattacagcccgttcaccccatacactaactgctgtcttgttgacctgaaaggcatgttagaaaatgggttccggatgggtaacgctgatatcgaaccgcctaaatcgatcggtgttgctaccgctctcatggcgcagatcaccgcacagattgcttctcaccagtacggcgggacaacctttgcaaatgtcgatcaggtgctggccccttacgttgaaatgacgtacaacaaacactttaaagatgctgtttggtacggggttcctaaatcaaaacagtatgcgatggaaaaaacagaaaaggatgtattcgatgcgttccagtcatacgaatatgaagtaaacaccttacatactgcaaatggacagacgccttttgtcacaatcactttcggtatgggtactggttggcgcgaacgcatgatccagaaagcgattctgaaaaaccgtattcgtggactgggtaaaaaaggcattacccctgtattcccaaaactggttatgtttatggaaaaagggattaaccttaatccggaagacagaaactatgatattaagaaattggccctggaatgtgcttcaaagcgtatgtatccggatattattagcgcggctaataaccgtcgtattactggctctagcattcctgtatctcctatgggttgtcgtagtttccttagcgtgtggaatgatgagcacggtaatgaaattcttgatggacgtaataacctgggcgttgtgacaatcaaccttcctcgtattgcgattgaagccgaagcacaggaagatgaagacgcgcatgatgcattttggcgtatccttgatgaacgtctggaactgtgctttgaagccctgatgactcgtatcgatagcctacgcggtgttaaagccagtgtagccccgatcctttatacagaaggtgcgtttggtgtaaggttgaaacccgatgatgaaattctggaattgttcaaaaatggacgcagttctatcagtctgggatacatcggattgcatgaaactctgatgcttttcggatctggacaacacccattcgaccggatcggttctcagaacatgggtagactgattctggaatatctacgcgctgcgaccgaagcatggaaaaagaaaaccggatttgggtttagtctgtactcaacccctgctgaatctctatgtcatcgtttctgcaaactggactatgagaaattcggaagtatcaaagggatcacagataaaggctggtacactaacagttttcatctggacgttgaccgcaaggtaacacctttcgagaaaatcgactatgaagccgattatcattacattgcaactgctggacatatcagctatgtagaattccctgatatgaaaaacaacctggaagcccttgaaaaagtctgggattatgcaatggataaactggactacttcggaactaaccttccggtcgataaatgctttgaatgtggctctgatgatgaatttaagccaacagaagacggttttcattgtacccattgtgggaatcaggatccggaaaaaatgagcgtcacgcgccgtacatgcggctatttgggtgctcccgctgtccgtgggttcaacgaaggtaagaacaaagaaatgatgcatcgcactaagcatcaaaattaatcaaaaagcccttgacttcggttgagggcttttgttatattgggcctatcgaaaaggagacatattatgaaactgactaagaaaatgaccgatgtagtggcatgtgcgtttgcattaggctacaaagttgaaaatcatccaactcgcgttgaagtcatcaaccctatcaagggccgtcctggtttggttctgtgtgaagacggtacagcatatcgtaatgatgtctctttagaactggcaactactatccgcaccgcaaaacaaatgaaagatgttctcattagcggcgcaaaatgaggaatttataatgtattggacaaaagataaatttgtttttcgtgatgaaacgtgctttgggactgcataccgaaacttagctattcgtggtggttcgttttcagctaatgatttgtctaaggtagtattccctattaaagttactgagtatgacgtattcggtgttaaagggtttactgattactttgatacaaagtttgaatcagaatcttacattttcactaatagcgatcgtgaattattcaaaaaacacgttgttgttaaagagaaaccgttattaccaaaagaagatgaagcaaaggaaatctatgatctcctgaacatgcttgataatcttggtacttgtcatctgttcgggaaacgcgcccgtaaagcgaaagatgttctcaatctgttacgctctcgccggaattacctgatccgggaagcagaacgtaatctgaaaaattcagaaaaacaggtcgatgttcataaatccactcttgcgaaattaaaggctttgtgatgtttccgttatacgctaaagtgcgtcgaaatgtcggtgattcgtatcaggaatggagtgaatggctacgcgaaacaaagtcattctacatttcaaaagcaactgatatgaaaggccgtaacattcgctatcgtaaacccagtggtaagcgagtgaatgggatagattacattgttcttgattcgattcgggatgatataaaatgattagcaagatccttgataagttatttccttcccgtattgctgaacgcgagaagagacaaaatcgttttcagaacgctattgactatctcgaagaaattcgatttcagaaattcctcgaagataaaaagatgcgtgaagatgagaagcacccaaattctaaaatggctgacggtgtaacaaaatgtgctgttggtcggacgtggaaacgaaaagactacaaggatcttgtttctgctataccacgcggaagcctggaagattactcaaaagcaactggccgatcttatatcggatgtcttaacagactctgtatgattggtgttgtcaagagaatgactcctacgtataatcatgtttatatggctatcgtaaagaaaagaaggttgcaattctatgcagcatctggggaatctatcaatctaattgatgatttaattgaagttgggtatgtagacgacgggaaaattttaaaagctcctgattatctacgcggtaaactattgaaataggtataaattatgattttcaacaaaacaaattcacgtaatttgaactatctacgctgtgaactggaagctaacgaaatcgaactgtttttctgtggggctacagatccggaacacaaattgcattgggtatcaggtgagattgtaagcctaaccgatcagattgtcgaagaggctacccgccgcgatgcaatcgttaaaattggtgctgttgatgtgaactacgaaggacatccttcatttttcattcaatattatccataaaagcattgacctgtatgtctgaatgtagtaacatccttcttgtcaactaaggaggatgttatgaaaatcaaaaacactgctactgaaactctttgtaacgaaattgcagaaatgtactggagtaaaggtcacttagaggctatgaaagagtttcaaaagtggtgtgatacccaaaagttagctaaatgggaatacatcgttattgttgaacggatcaaagaattgatccttgtgaagaaaggtaataaataaccatgtaaatcaacatggaacccaatatgaactatcaaaaaatatacgattctctcatatcgaaatataggggagaacctccaatatcttacagacacaagaaatcaggttacgagattcatcacatatacccaaaatcaatgggtggatctgatgaaccagataacttagtatatcttacaccaaaacagcattatactgcacatcatcttctgtctaaaatatatggcggtactatgcataacgcattttggattatgtcattttctcgtgggtttcccatcacagcaaggcagtataaaactgcaaaagagaataaaattctcaatcaaactggaagaaagcattctcctgaaactatagaaaaaatgataaaatccagacaaggaagaacgtattctattgaatcgcgtagaaaaatgagtgaatcacataaaggatattctcatagtgaagaaacaaaagagaaaacacgaaaaagttgtttagtttctaaagctagatttgtgaaagttgctatcgggacgaatatcaaagatccgtcaattgttatccggctgtgcggaaaaactgatatacgcaatcacggattcagtcaaggtaaggttcattcttgctgtcgcggtgaaataaaaagttataaaggctatacatggagatttgaatgaattatattagaatttataacatggatgtggtcaacggaaaagggatccgtgttgttttgtttgtggccggatgcaatcataagtgtgatgggtgctataatcgcagttcatggaatccttgcaacggaacaccgtacacggaagagacagaaaaccatctgatttctctgttgagtaatccgcatgttgatggacttacattaactggcggcgatccgctttaccgcgacaactatcctactatcctaaaactgcttgagcgcgtttctaaggaacttccaaagaaaaacgtatggttatggacaggatataccctggaggctttacaggccgacccagaacgttctaagctacttccttacattgatgttctgattgatggtaagtatgaaaaagatttgccaacgaaaaagccgtttcgcggttcagataatcaacgtatgatcgaattcgctaaaaattcgatagaaattaaaaatattgcttgacctaatgtgtaactatggtaatcttaccacatcgtaaatgacgattaactttaattgagagataatatcatgatcctgaatttcaaaacccgtaaagaagcgcgtaactactgctggaagtggaacattcccctgaaaaccatccgtaatacagggcgcggttcttgcccgtggacagttcaagcaaatgaactgaaaacgttcgtggttggtaaaacttacaaactggttgaccgtgaagggtttactaccaattcacacggcggatctaacaccgcaaacactatccaggcgagacagatcgaaaaattcctgaataacgaggtaaaaattatctcgaaaaccaattcagatactttcaaaattgagcatactccggaaatgacttttagctctctgcgttcgtgggaagctcgttatttcgtcgaagttggcgcggctccggttaagaaaacgaaagctaaaccgaaaaaagccaacgttacggctccggtcgcacctgttgcaccagtaacagcagatcttgatcaaatgcttgatggtggttcggcaatgtcggttgaactggatcctactaaatttgttgaaggccgttcgtatgttctggttaaaccgcagcaatttaaaaatcgttgtggtgctaaccacgggatcaaatcatataccgatgaacacagtaatggtgtatacaccgtttaccatacgacttcgctcggtcatcatcaattgagcaaaacggtagaaaccattgattcccagaccggaaaagttggttactacctgcttgattctgaacgttcgttcttccgtgaactggcgacaggaactgttgatgaacctgttagcgtttccggtaatagcgctattgctatcaatgtagacgaagcggctaagaaagaagaaatcgcaaaagcaatggcacagcttgaagaagcggttaaagcccatgatgacgcgcttcaaaatctgcgtactgcttccgacctggttcgcaaagctgctcgaaaagtagcagaagtaagcaagtaaattaaactgggtgctccggcacccttttttatgaggtgacacatggaattattagaaggtaaatcttataccctgaacattgacgctaaagaatttgcagaaaaaacctggcgaaatgctttagctgaattgatcaaaaacaacggctatatcacaatcgatcgtattgcgattggggatactgaggacattgcttatgttctgcaagatgatttcgaatatgagatccctagccatatctggaaatacttcaaaccatatgatttgccggaagaagaaccgaagatcgctactaaagaagaaatcgccgcgcctgatttaaattttgtatcttccgatcctaaaatgtggatgactgtaaaacctgttcaacaagatatcaatgatctgcgatttgattatccttttgtcaagcggatcacttcgatttctgtactaccagcgccgacggattcacaggcacttgaatttgcattacagcatgttttcggtgataataagctgtacgcgattgacaaggaagctgctattgatgaacagaaaaaggaaatcatcaaccttctttctctgcatcaacaacttgaagcggtggaattgattgagcgtatgctttctgatacaaagaaagatatcattagcaaaatcactccggcacgaaggaaagcaattgatgaaaatcgagatttacggtattccagaatcgcttcataaatgttatggttgtattgaagctcggaaattacttgatgagcatggattagaatacgaattttattctgttctaaagccagcaaataacagtgtggggtttgattacgatagaccccgcattgaagagttagcgaaacgtgttcgtagtcgaagcatggcatttacttaccctcggatctttgtagatggtaattttattggcggttatatgcaattgaaagagtatttgggtgaagcatgaataaagaatacattcgcaaagtagcaaacgctattcacgcaacaacgattgattttctggaagggtttgatcatattatccatcccgaaacgttggatagttgggaagccaaactgtttaaaagcatcaatgaacagtttccggaaaaggttaagcgctggtttatcagacaggaaatcgtagcaacgatccttaatgaacgtggtgttgaggcgttcggtgtaacccctctatataagcgaaaccagattacagacgaaacaatcaagaaatataaaaagatggttcggaagtaataaataatcagttaaatggccttcgggccattttttgtatataaatattggtattgaatacaatataggaaaaaagataatggtagctaaatcattccgcgcacgaagtggccttgatgctgctggtgaaaaagttatcaacgttgggaaggctgatcgtaatacgctgagtgacggcgttaacgttgactttttcaatgaatttaacggaatccagcagtatgacccgacccgtggctattctcaagacatggcgatcatttatgcgcgtcgtatctggtacgcaaaacagaatattgcttcccctgctggggctttcgacgaatcaaaatggatcgcaactcgtaatgacccgaaatgggtttatagtaacgtaaccactccagacggtagcattattgaatctggtagttacattatggctgatggacgctttactgaacttctgtacctgttgccggacaacccgacagagggcgacgtaatcacgtttaaagattgcggtggtttagtaggtgtgaacagtatccttgttaagtctaacacccgtcagatccgtttacgtactgtacaatcagcacagtatagactgactcacccgtacatgatcgcaacgtttatctataacggtaacgtatggcgtgttgctgaaactctggacaaccgcgattctgagatcgtgaacgcaaccggaacaggttcattccagttacaatctggtatgacagttttccgtaacagtgctacgggtaaaatcactctccagttgccgaaatatgcaaatgatggtgatgtgatcacaacctatgacgctgataaaatgaactctatcaacgtagccgttttgcagatttatccaggtagtggacacactattactgatggtgcaagtactggtgttacttcggtaagtagccagaaatccggctttggtatgttcatctttgatgcacagaatagccaatggaaagtatatgatgctgataaccgtgttcgtctgcgtcgtatctatagtgatttaaacgcagttcctaacgattacgtttttgttactgcaaacccttctgggactataccaaacgttactgttacccttccaactgatgttgctgatggtgatcgcgtttacgtatccctttatatgatgggtaaaaaccagaactgtacaatcaaagttaaagatggtactacggataagatccgaaccaacaaaaatatgatgcagttcccgcagcgcaaagattatccgcctgatgattggtttagtgtaacttcattagcatttaatgctggtagcgattacctcccgtatatcgagttttcttatttgaaagctacgaaagaatgggttattgctaattatcgtccaatcgttgaacgtgttgatgcaactaacagatcgcgtactggtgttattgctctggctgcacaggcagaagtaaacaaaaacttggaagataacccgaacgacgaaaccgctattactccgatgacgttagcaaataaaactgctacagaaacccgtcgtggtattgcgcggttagcaacaactgctgaggttaacaaactttcaaccgatacctatctggatgatgtgattgttacccctaagaagctgaacgaaagaacagcaactgaaacccgtcgtgggctggcagaaatcgcaactcaggcagaaacaaacggaagcaccgatgatattactattgtaacccctaaaaagttgcataaccgtattgcatcgccgaccttgactggtatccttgcccttgttgctactggtggtactgcaaacaccaacacagaccgtgctcaggctggtactggaatttatgatcactcagattatcaaaaagcggtaacgcctaaaacactgcgtgagtataaagcaactgaattacaatccggtgctgtatggctggcaaacctgaatgaagttattaacggtactgttgcaagttctaacattccgaccgtcgttactccggaaatgttacacaagaaaacttctactgatgcgcgtattggtttgatcgagattgctacccaggcagaaaccaacgcagggactgattacacgcgagcggtgacgcctaaaacgcttaacgatcgtgctgcaacggaatcgctgacaggtatcattgcaattgcaaccactgccgaagtatcagcaggtactgtaacgaataaagcgatcgtaccgtctaaactgaaaggttatttggacgatacaagccatattactgttgctaccgctgacggattaactcaatctggtactatctggactacggttaacatcggtattcaatcagcaactgaaactcaacgtggtactttacgcgttgctacgcagtctgagacgaacgcagggacattagatacagtatttgtcacccctaagaagttacacgctaagaaagcgactgagagcgcagaaggtatcattcaggtggctacggctgctgaaactaccgctggcaccgttgcaaacaaggctgtttctcctaagaacttgaaaaatacaattcaggttgatacttcatggcaagctaccgatctggtacgtggtactgtgaagctgtctaaggggcttggtacttggtcgggtaatgatgtggctggttctactcttccggatgatggttacgcctctgtaggtgttgctgtttctccttatgaattgaacctgacgctgaaacattatctgccgatcggtgctaaagcggttgatgctgataaactggataacctggattcttcccagttcattcgtcgtgatgttaatcagacggttaacggggcattgactctaacgaaagaaaccactgtacaggctaacattaactcaaccgccgacgcgagtttccgggtaatgaatgttagtggagatctgaacgttggtgatggctcatcgatgggtaaacttcgtttgaatggcggttcatctaacgactggtcaattcaagcaagttcatcctctgggcgtattgcaatgatctcaacgggtaacactggcacagttcatctttctgtgtataatgatactcgcggcgttgtagctaacgttaaattccaggctcctgaaattcaggcgattggcaaagtgactctgggtaatgatacagtgatcacggctgctggttctgttctctctatgggtacgaacaacaagacaactaagatcctaacttcggacgctggtaacattttggcagaagaatcagggaactcttataaagtctttactgagaagaacgcgcaaaccttgctgaatcctacgtatgtacgtaaagcaggtgatacgatgtctgggcgcttgacggtaagcaacagttcaattatcattgcaggtcaagcggcttggtcaacgctggatgcagtaacagaagcatccaggggcaactggacggctgagatcacagcatcggcacaatacaacttgcttcctggttatgcggttccggttcttgaaccagatccgattaatccagaaatcatgattgtgacccgttatacctatgttaaagcaccgggtactttaacgcagtttggtaacggaactgcattcacttatcagatttgggcacctcgtccgacctctggtactggtgttaatgcgctggcgcaatccttctggatccgtcaaatgaacccaattacgggtaaatttgatggttggggccgcatgtatactagcaacaacccgcctactgctggtgagattggtgcaacgtctgctgttggtactacggttaaaaacatgactgttaccgattggatcaaagttggtaatgttaagatttacccagatccggttactcagacagttaaatttgagtgggtggcataatgtcaaacttaatggcggggttcggccccgattttgtagaaacgcaaattctatcggaaacaaacagcgtaacttacagaataaccgcaaaggcaacacatcccaatgcggttcctaatcagtatgagtttacactaaatcaaaaggcggtagggacaccgcctagtgttgggatcaacgtatggagaattaacaatgctgtagttgatccaattaaaaccttcacattatcgaatgataattcagcaactgcaaacaaagcgtttgttgaatatatggatgctcaaccttctgggctgtatttgataatgactaacggtgaatacaaaacaagccaaatcgttgatgattggtttgctaaaaacagatccgttatgtggcaaggcgctgatttcgctcagagattcccaaattctgcatatgttgcattgtatggggcttcaaaatctcgtatactgattgaatcgttttacgcgaacgatggagttttaaaagaagattcacgcgcatcaatcgatcttgtctatgataacgttggtgatgttgggcgaactggtgtacctttccgatctgttgaagatacggaagaatacaattcaaccaatgggtctgaatataaagtatatcctgttgcaaacccagtgatctctaaactggctgattatggtatggctcctggattagctatgatgattgctggtgatttttacgccagcaaagcattattggatgctggatcaacaacaagggttactgttcgatggtttacgggtactgctcaaacttcatcatcggtgattgaagttcctgcaaataaacctgatgagtggttacgatttgaacagttctatacgatccctagtggttgtgatggatttaacgttgctgtatctcgttatcctaaacccgctacggatagtttatctgcgatccgtaactttgtgatggttcaggtatctgctgccgaagctgatcaaaactttgctgcacagtttggggttaacggtatcagaatgaacaacatgatcgatggcggaacaccgtatatatttgaattgcctaatactaaggtttatccaggtggtgattattctgcttccgaattccgtgaagttgatgcataaacaaaggcccggaacatcgggccttataaatatgtaaaaaggggttattatggcagatttaaaagctggttctacagtcgggggtttacctatttggcactccggcacatttccgctggttccggttggtaatactctaacctatcgcggatataaggtttatactgaaaacgataaaccgcaagcatcaaataacgacttcgtttctaaagcaagcggtggtcaatatttgggtgtagttgcctttaaacaggggctacaaattaacgctactttcacaggcggaagtgaccagaacggtttatattctggtgatggtgatggcgcgacattatcaaaagccaacattgatcttgtatcatggtatggtattggtattcgttcatcttccggtactaatggtcgcgtattagtcatcaacgctcgaaatggtgatttaaacactcagggtaatattacggttgaaaagcaaatcagtattacaaccgctaaccctactgacgcaagtcatgcaacacgaaaaagttatgttgatggacagataaataatgtcacaacaaatgctaatagcagggtattacgcgctggcgatacaatgacagggctattaactgccccgcaattcgcgagcacaggcgcggcttcccgtcccgaacacgtaccacggctcgaccaggtaattactaaagggactatcatagattttggatcttattaaggtgaaacatggctgatttagaaaaaattcaattcctacgtagcacagttgcggggaaaacacctactacaagtcagcttgcagatggtgaactggcgatcaacatggctgattatgccatttacacgaaaaatggttcttcgatcgttcagttagcgggtaaaggtatcccagaaacaaataccaaaaaattaacagttgatgggcctagtgctcttaatgataccgttaccgtagcggaaggtaaaactattactttcaccaacgagaatttaagtggtgaaataactcgtcatatcgtcggtaaatgtgccagcaatgatggatggtacatcggttccggtggtacaagcaataacggcattcttgaaatcggtactattgacgatggtactgaaacaatccagtttgtacaacgcggtgctggtaacgtagaagccagaaaattagtcttacttgatagctctggtaatactactcttcctggggatttaagattaactagcaagactgttaaaatttcgaatggaagcactcttacactagaaatgggtgtaggtgctaatgacgcttacattaaaaacttgagaggctctggcgttcttcaattaactaatgacggcaatctgacgttcagaaattcccaggtttattatgctatgagtggaagaggccctggtaaagatggtactcttctgactaatgtagaaaacgagcgccaacttaagcaagataatttccctatatctacaggcaccgaagctcggtggactaaagttgctcttttaaaagatcctggatcaaaccagagtcgcctgcaactgatggtgactaacggcggtaactatggttctacgcgtggatctatcgactttatcgattgtagcgctagaagcattcccgcaacattaacaagcgcaaacattagttcttatctgcaaattcgtcgaatcggcgatcctggaattgataacactaaccaaatgcgttatagtctggttcgtacctctgagggtttagaactgtggtttactcaacgcgcgtttattggtggtgttaaagttgctctgctgtctatcgctggttatactgagtattatctgcctaacggttacacaacttctgcaactgctccggaaggtttagttgagagtgtggctattcgtatctatgacgaaatgaataaacctaaccttgacaatggtactgatggtattctgtctattgctaaaggtggtacaggcgcaagtacagcggatgctgctcgtacaaacttaggggctgttgctcgtgctggcgataccatgaccggtaacttgactattaacgctaacttaaaagtcgaaaaccctaatggaacgatggttgatttaggttcagagaactcagacaagtacagcagattaacccttgctcgtaaagttggtagcggtgctaccgtagcaatgcttaaagttactcctgaaggacacgtgcaatttggttatcaagatgcagttgctactccagctcctagtaaatatattctagttaaatccagcggtcttgaggtagaaggggatttagtttttaatcagacctatcgcggcaccgaagaggcagttgatattactgataagactgttgaccttaatggtcttgtcattaaaggaaccgacccaggtactcgtcagatgtataaatgcttctcatctggtggtggttctaatatagctaataaacctacctctgatggcaactttgttcttgaagttttatctttgcgtaaaatttctgatactgattggacgtgtaagcagacctttactacaaagaacggcggcgttgaaggtacgtatgttcgctacggacaaaacggctcatggtctgcatggaaagaagttgttgctggcgtccaaccaattaatttaggtggtactggtgcaacttctgtagctgccgctcgtaataacctcggtgttggtgaatggcaatctgtggcatttggtgtattgaatgtcaacggcgttagtaatgcagacccggccatcacatttaaaaatggggctatggttcgtgaagcacaaggtggtagtctcggtgcgttaatcctgtcagcttctgcttctgctacagattcggctaaatatattgcttttcgacccttcggtgattcgtctggtactgagattagagtaaaagccaacgtgtacaacgagccttcgcttgaatggtcttatggcgctggcgttcgttcatccgctgtaggtgcttttgtgatttatgcaaaaacaggtcaggcactccatttaagaccaaacggtgataattctaaccaagccacagttattgaccaaaacggtaaaatgacagtcggtggtgagttcgaggcccagaactcgaaaatcacaggcaacttgagcgtttccgaagataacagaatgatcgttcttggcaaaaacaccgatattggtttagtcaagaaaagtggtatgccaggaaaaatggctattagtaaatctaactcgtttactatcatggtatcaacaaataccaacaaccaaattaatcctgctgatacgtttaatgatatattcaaagtagatgctgatggaaaccagactgtttacggaaatgcccagattaacagacagctaacagtttctagtgcagcgactgttaatggtgttattaatgctaacggcggtattattgttcctactaccaagtatgtacaaattgccgatgctcctacgcagaataaccaagccaccaacaagaaatatgttgatgataaggttgcttctgctattagtaatgctggcgacacgtatcttccgttagcaggtggtactgtaactgggcggttaacaattacaggcgatcagttaaaaactacatcactttgggttacgggagacgctgctgttaatggtgttttaactgttgatggaagggctagatttaatcaagagttcattgtatcaacttcggttaacgtccagaacactggtaacagtcatttggtcttccgtaaagctgatggtacagaaaaaggacttatttgggctgatgagcctggtagcgttagtataagagcaggtggtgtctctgggccaacgtggaatttctggaacagtggttcttgccaattcccaggtgctattagtaactttaatggtgttaatagtactactaattaccctggcggcggaagtggcgcgtatttaaataccgctggcttaacaagtagatttagtaatggtgcttatgtttccttatacttccaagaatatgtaggaaattatcaccaggctattcttaatgttaacggctatggtcgagatgacaatttctatttcagggctggcggcgacttcttctgtactcgcaacgggtcattcgataacgtagagattcgttctgaccgtagagctaaatctgatattaaagttattgaaaacgctttagaaaaggttgaaacattatctggtaatacttatgaacttcataacacttctggcggtactactcgttctgctgggttgattgctcaggaagttcaagaaatcttaccggaagcagttactcaagataatgaagaagatggcggtatgcttcgtctgaattataactcagtaattgcacttctcgttgaatctgttaaagagctttctgccgaagttaaaaatcttaaagcagaaattgaagaacttaaatctaaataatgcatggggcttcggccccatcttttaggagaaataactatggcagtaacagggccgtgggtcggaagttcagcaaaggctgaaactggtgagtcgtggatggctcaagctggggccaaattaagaatagggacaccgttttggatgtctaatatgattggacaaagcgtattccatttaattttcagaattaactatgcacagggttcttctggtgatccatctagatatagaggattctttaaaagagggttagcagtaaacataggagactctgcaaaccaaccgacgctgaatgcgttccctggtggagatgtgggttcattagtagctattacaaatatcaaaggcgacccttattgcctttctatttggaatggtcaagataggcgagttaaagtgtctatatttaatgcatccggtggagaccagtatgatgtttatttcagcggaactactatgagtgatggttggagaagatatagatgtgaaaacgctggcggtctcaatgggtattttgaggctagaatggataaccagtttggtgctttattagaatatgtttgataggtaaaccaacaaattcacctcataatattaaatagattaaaaggctacctgtatggtagccttttgttgtatcctaaatatacgtatagtaacctaagaagagtcttataaaaatggctgagagaaatcccgtagataaactagccttatttgaccgggtaatctcgtttgtgatgggtgtgaaaacatggaaacaattgctgataaaaataattctaataatggttatgtttcttatggtagtaacttggtacaaatggactgatatattcccgatgataaaaggtgcccttgtagtcgatacaagggctatcgaaatggaaagaactgaaaagtttaatcaatccgcgttggaacagttgagcatagttcatcttacttccaacgcggatttttcagcggtattggcattcagaccaaagaatataaactattttgttgacattgtagaatatcagggaaaattaccatcccagatcgatcctaaaaacctcggcggttatccgatcgataaaacatccgaagagtacacgaatcatataaatggcttgtattattcatccactaaagcaagttcctacctaccgacacgtgattttgtgccagtagcttatacttttagttgcccttattttaatcttgataactactattctggatcggttttgatggaatggtacgcaaagcggcctaatataccagatatgaagctaaacatcatatgtggacaggccgcgcgtattttaggtcgagtgaggtgattaacgtaatgctggtgttaaattgtgtgttcttccaatagcccgtttgattgctttaaagaagttcatcaccgggctatttttctcgtaaatatcccaaactttcaatttgtcccacggatccggaacataatcttcattccttgccgaaacccctaacgtaacccgcctgtatccagcgctgtcgtgataatacacgaagaatggcctacctattggcgcaaccttacaacctctcttagcggctctcatagcctcatcgaacgtcattgatacctccaaaaatttctatgcatgtttggtcgaattccgatagtttcactcaaaatgaatatcggatgatctagctcatcgtggttttcttcgtcaatgacgatatcccaatcagtagccttttgttcttctaccgtggcaatgaatacctggtttacttcacacttgcggtgtgtacgtctgatgattgtatccccttcacgaaacacaatcatatcagggttggtagtgcggtacgcggttttacccgcgcacacttcattaagcatatcttcgtatgtcattataaaacctttacacgttgaacgatggtttgtttaacgtctttgtattctccgtgctctttaacggttgctttgaaagtgatttcatcaccttcgtttgcaatgttattaccgaagtaaacaacaacattaccatcaacattaattttggtcatgaatctttctacagaagtgtagtaagaaacttgagtatatcccagtgaaatcactttctcaacggttccggtcatttccagacgctgtttgatttcaccgatgtggttagctttagaaatgcgttcctgacgctcttgttcccactgttcgcggatttcttcgcgtttggcgatataatccttctccagtgcaacacccatgcagtaggcgcacacagcgtcaaaaacagggctgtttttgttgtcttctttagacttgtcagcccaccaaagaacagtaaacattggcatttctgcaattacttcgcctttacgcttgccaatcggcatgatccctttttccagcagttccagtttttcagtatcgaacactgacagtttaccgcgacgttcgaacagatcgaaatctgcaaagccctggaataccattttgaaagtatcagtttcagttaaacgggctgaaacacggtcgaaatactcacgcgctttcgcttccgctttctccggatcggtagataagttgcagatatagttatcagaagtataaccgccacctctacgctcaacacgcaaggtgtacattgcatttttacgaccagaagaaatgaagtaagtggtagtaactacggttgcgttagtcatggtatttctccttaaagggtatctcgtttcgatatggctaatatagcaaaagcccctgaccgaagtcaagggctttttcatcattcattcgaatctttcattgttttatgaagatgaatatcaaaaattttccagtacgcctttccgcgaggataaatttttgctttgtcaatatcgttgttgcttccccatgtgttgtttgggccacgacatcgattttttatataatctgtatgccagaataagcgctgaaccgatgattccgtacctaatggatcttctttactgaacagaatttgtatactcataagaagaacccagtgcgaacaatcagatcgattttcttttctggttcaaacggtgatttgctatcgatgttacactgatagaacataccaacatacttttcaggaatgttagattcaagcgcccatttcaggttgtcatcggtattcggccccaacataaggttaacaacatcaacagcataatcctgctctttggtgttaccggaaccgtttacataatgcccgtgggctgttttgaggatctcaattacttcgctatcgtcggtttcgactttgtaaagcgttgtattttcaggaatttcttcaagaatgatcaaagcggttttcatcacacttacctttgtgtttctgtttacgttttgcttctttaaatgctcgcttgcgatcgcggtgagtagaagcgcggttaatccatgcatgtttcgctaccaaattattcatataagccccttaaagaaaaatatttaggggctttcgcccctgtatcaatccagcagtttgcggatcttgtctgcgatacgtccggcacgggttgcgcttgcagtatgatcgctttcttttgaagccagttccgccagcttacgctgatgttcttcttctgctgcttggcgatctgctgcaacctgtgcaacctgctcattatcgtgagcaatacgcgcttccagttcagacagggttttgtcgaaagttgctacgatttcatctacagaacgaattttattaaacagtttcataatttatctcaattggttagttttaatcagtatacatcaatacggctggaattcaaaatcataaatgtcattcagtgcgcggttccactcggtgtagttttcaccagcaccataacgcatttgaatagcactttcgaacgttgatccgttgaggttcgggaaaccgaacaggtttttgattttgtcatgtgctacatagtacaaagaagcactttccagcatcgcaaccatcgcagacggttcgtgttcgcggcgcttgatacgtaacagagtacgactagcaccagttttacggcgttgatttggtgctacgtagaaacggaatactacgcgccctgttttatcatcaactaccaggtaaaacccgttttctttcagatccacgccttcgaatttcttgaaggttccgcgtttcatgtcaccaattttaattgcatatttgtgaatgtcaagtcttgtcagaattcttttcatatttttttagataccagtttgcctaattttgtaatttcgcctgtttttacgttaacaaacaaggcgatgctcagaaatgggatgctaatcactacgctgatcaatgtaaacagaaaacgtatcacaaaaagaacagcacgttcaagatatcgttgcatccacgcgattcctaaacaactataccctactataaaggtggttgcaacataaaatgcaccaaatcctttacgaaatacgtaacctttcccggattctatccggtcgtcggcccacatttcacgggcagttttcagaatagattcaccactagcgcgagtttcgttagccgaaggcatgtttttaaatttcatgatagtctcctatgcgcccagaactctccgggcgcggttgtttagttagtaatggctaaaaccatatgtaacatcaatcatgactttataacggcatacacgcatttttgcgttattgtaatccactgggatcgctaccacgtcagcaggatccacctttacctgaatgactctaccaacaccgcccccgtagtgtggaaggtatgatttagccgcaacgtgtaggccagtagaacaggtgcgcgttttatcttcgtctaccatgtttcgaggcatggagacagtcacaccaggactattatcaaatttgccagtagcgagatctttatagttatcgcgcacacgtttccaggcaaggaaacaaccatcatcggtcagttcaatgtcattatgtacaaggaacccataaagctggtatacagcatcgcgtgaagggtttcgcatcaaccgttcaaagaagttcaccagatgttcatacggacgatcgttatacatttcgcgaatgattcgttgagtgatatcagaatcaaacactacatctttatatagaagctgatgaccaatgattttaatgttgcctttgctataggttcggatcgcttcttgagtatccaaacaagttacagcacctttgacatcaccagctttcagcatttcatgcgctttcttaaagttcggatgtgtttcacccgccatgaaaacgcgcccttcgtatacaaccgtaatgaacgattcagatccgatcatacgcggtacagtgtctgatactttaggcgtttgttttacatcccttttcttagggaattccgctaacttgcggttgataacgcgcccaatggttcgggcgcttacgttgaactgttgggctagtgctgttttacttgcccccgtcaaccatccattatagatagctttctgttgtacttcgtcgagaattttgaccattatttccaccgtattaatttcttaaactcactgagattcttttcgttgttgtaaatcggacgaattgaataagaatcgctatgttcaacaagtgaagccagtaacgggtttagtgatttaaagatttcccatgcctgatcaacacgttttttcatattgctgcgtttaacgcgcattgatgctacggattcacgcagaatcggacaacgcaccctggaaagatttttaccatctttctcatacccttccagacacactatacgttcgagggtatcaacaatcttatacagtttttcattatatcggtttttcacaatccgatcaagcgatacaccgaaacggctatgcaatgcgtctgtttctgttgagtgatccttcccaatccatccaggcaagcaattatctttcaatgccttttcagatttaacatactgcttgcacagcatatcatcaaagcataccagatttgaatccgggatccacttccagaggctgttacgtatagcaaacacaacagggatcccagtatggcgcatgatacgcgataaagtagattctttcattgctgaatccatagacaacccggaattttcaccatctaagcggctatattcatcaataccatacaaccgaacacctggggctttatccagtgataaaaactctgattttgtcataaacagagaagtttttgccagattgccgttactatccaactcataacgatatacggtcggggtttttgggcgcggttctgaatttttcggtgcatatagcgcttttgatttttcgcgatctgcatcatagatctctttttcttttgtcatttcactggtacggagatacacaatttccgattcatcaaaatgacctttccgaacgatatcattaacaatctcacgctttgaatcactatcgtaatatgcaacaaagctaacacggcttaggttatgcattttagcatacccgacgatatacggtttaaccgtgttggtatccacttttaacagaatgagtttcttctgtttccacggataataaatgcgtgtgatgtcctggcgtttggttgtttctggcttatacttgctccagcggcctccgctaccagttacctgataccatgcatctttaccgtcgtattcgttcgcccaatacccagcaacataatcatcattatatttgtttggtttgactagttcgctatggatccagccaatagaatcaccattgatgcgaaaattagcatctttaccaacaaagttttgtaccattgaaggcagagaatggaaccacgtcagtttatcacgcacggtttgtaacttatcgaattctgatttaactcgattgaaatatacccggctgatttgtttcagacgttctttaacaatccctactgtcattttatccatactcaactcttcgcgagaaggcatgaaatcaagttcaccgatcgggaagtcaataatatacgtatactggctttctgtatagcaatagaacatcgaggtatcatacaaatctttatccagaggataaatgatgttacccatgcgagcatatacaccgctagtgtatgctgatttatgacggatcaccccgctatcgttggttgcttctttcggctgatagttgattttgagaatagaagcaccaacaaagttaggacgaatatcagtaaatgattcgtatacccttgctgcttcgttttcccattctttgatatcttcaaccttaacaggaacagtgatagtaaccccgttaggttcatcgctttcaatctcatacagaggatcgcagaaaggttccccatcatccatatagattgtgtaaccgcatttgataccgtcttttacggattccaccgtgaaagcatcggaatagcaaagcggagatttgcaacccagccccatagaaccgatcaggtcgtttgaatcatttttagttgattcgaagtaaacggtaaacgcatcactaacgaaatccggagacataccgatcccgtagtcacgaataacaaaacgaggatcaacagcagttggcaactggacatcaaacgggttctgatttcccgcttctttgtgtccatcgatcgcattacaagacagttcgcgaatgattgcgcggatcttgtatttgtatactgtcgaagaaaggatcttatacgctttcttgtttgcgcgtagagatagtttgtttcgtcccttgctggtatctgtaccaacacgatagatggtttgcggtgtatcttcgcgtaatttcattgtttatttctcacttaatattaaaaatgacttgatcacaagagtacttcgttggctttttgttcagaccatattccaccacttcgcaataagtgtcaaggaattttatcaatttttcttcgtcctctttttcctttttcatatcacggatacccatcacaatagcaatgatgatagaacagaagaatacacagatcccaaatatggtcagatattttcctaattttggtgaattataacgtgtcataccttacccctctttgcgaatatatgcaagttcttcatgggttactggacggatatacagacggccttttgtgtatgccttgcgcccactgatccaaatgtttttcatatccttaacaccgttcatcacatcgttgtaaaacttcttatcagctttagcctgatagacttcacggccttgataatctttcatgaacaaacagtaaaggatctcattcttatcaaccagattagcatcctttgtagttgttttactcggtgaaggtttagcacccagtcgcaaggccatagcttgccacactttaccatgttcataaccgcgcccgacaagagcatgagcgatttcatgtaaaagagtgtctaaaatatcctcgtagatatcttccgcaacatgacgaccagatagttcgatcagttttttggtataactgcaacggcccagagtttttgtaatgcgtccattgatccggaatgtccaaccattactgatcaaaccgtgtttttccatcatggtacgcgcccagtgggttacttccattgcactacgagttttcaacattttagaatctcctttgcttggtacaaaaccaatatagcaaaaagccccctgcattgcaagaggctttgtaattatttcaatttcttagaaagttcttttaaatcattgagatactcaattttaggggttgtttcttcccagtatttcaactgtttacgcaattcttcggcttcgtcttccagctttttgctttcgtccgtggttagatggtagatgttcatagccactaacatttcggcatgattctcgcaacctatccacgtagacacaaatttaaccgcttcgctgcgactaagaccacgtagagaatcaggagattctaccatttgagcaataaacgcaacctttgccagtgctttatctaacgcttccttagtttcctggatacgcttattgatacgctgttgatatacattcatacgaatatcaacgaaatcctttagaagcgtttcagggcgttcgtatgagtatagtttgccctcaaagataacgttaatgtttgggtttgaattttcaatcaacccgaaatcttttaggatcttttcgcgggttaacccgttggcatactctcgcttgagcgttacttcataacgaaaatcttctttcgatagatccttgtagctaacgataacgcctttttcttccagcttgtcaaggattgcaatgtatttcacacggtcatatttcactgggatctcggtgatcaccaatttggttttaccttgcaattcatacgtgccgtaaattgtaccgtctgtgatttcacctttaaagtaagggtatttcagatccagtgtgaaatctttatcattcagatatgcaatgcacccgttaacaaccgatttaggatcatgaggcggaatgtttgttgcatatgcttttgcaatcccgctaaacccgttaaccagtaccatcgggatgatcgggagatagtacgctggcggtacatgttccggatcttcatgaactggcgttaaatcaccatccatataaattgctttgaatattggcgatagtttgcacttgatgtaacgaggtgcgccaggtttcttaaccaaacgggaaccaaagaacccatcacggtcgaataacggaatgttattgcaccagtgcgccgccataagggataacgcttcttctacagaggtttccccgtggtgatacccatacatagcaacaccgccagcgatagaagctactttctgaaatcccgttccgccctgcatcgcagagtgaataaagaaacggtgaacgggtttaaacccgtctaccaggtgcgggatcgcacgtgaataaatcgtgtaaagggcaaacgttagcccttccacctgtacaacatctttaatacttctttccattagtcaaccttagaaaatttgtgttttccattaacccaatctttacgcggatcagattcgtcgccgaagcatagttctaacacttctttgtattcgtcgtcaagtacaatgacatcatacttcaactgatcacccagaacacggtcgtaatcttctttgcgtaaagaacccagccccttgatatatcgtacatcttttgctttatcgcggaacggcgcaaactcatcaagagaatagaaccatttttcctcgcgcccaactttagcgataacgatcggggttcgaatatatcggatccgtttctcagtgaacaaagaaggccaacggctaaagaatgcaagcaacagagttaaaatgtcgccgccgtcaacgtcagcatcgaccatgatgccgatattatcataagtcattccggaagtatcaccaggatgaatattgaggatagccattagctcaaacagttctttgtttttgataatgtctgtaaaactcataccccatgtattcagaggcttaccacgtagcgggaaagcgccttgtgtttcttcattacggcattcgatgaactgaccaacagcggaatcaccttctgtcagaaacaatgttgtttctaccccaggggtatcaataccggaagccggaacgtgtttagcaatttttgcctttttcgctttctttttcgctttggtgatcgcggcggcttctgctgcttgtttacgaatcaatgcggattcaatgatcggagtaatgatttctggggtatccataatcatttttgcgatctttttgtagttcaaattcgcatgattgttaaactcacctgctgtatttgctaatcgctcttttgtttggctatcgaatgcaggtgcattaaagttatgcaggaataccacaagagttaagcattcttttacacgtgctttcgggatctcgatactatgctttttcttgatcatcggttcaagttcagaatagataccatcaatcatacactcaacatgaacaccgccgtttttcgtatccagaccgttaacaaaggatttctgtttaaacccgtcctcagtgctcgccagaatgaagctgaggcgattatttgtctggacaatggttttatccccatacatggaagcgtacagcgggaagcgattagagagcgtttcgccgttatatgtgaatttcacagacgggaaagcaacggcaagggccattaagcgatccttaatcacttctttggtttcttcatcgataccagttacaccaaacatagagaagtctggagtaaacttaacagtagtaccctgttctttactggggctggttcggtaatcgatgttctgtgcgccgtccgtacagttaatggttactttgcgtttcccgtttgcagtctcgccaataaaaatcgagctataacagtttgtcaggaaagaaccaacaccattcatacccaacgttacgcggtttttatcatcgaagttagaacccgattttgccatagtccatgccgcaactggtttaggaactattttcccatctggggtttttacatcatcctggggaataccgcgcccgttatcagagattttaaccagattatgatcaatggttacatcaatcttattagcatgtttgaattcagttcggatcgcttcatcaatcgagttatcaaggatttcgttgatgattttaaccaacccttccacgtactcaaccttgcgatattggcccattatgaaacgttcatgcgcttctttgttaaccgatccgacgtacatatttggacgcaaccgaatatgatcgcgatcgctcatacaaaatgattcgtcaacctttgcgccttttttggctggttgtggtttctgttctggttcatcatctgccagaagaaaatctaaactcatattcacctctttgtttaatcactgacattatatagggttctatgaaaaagaaaacccctttcggggtttacttgttataagggaaaccatcacgaaccatttgaggtttatcaaccgttcgttttgcttcgcctccgcaatcacaatctttaggtgcatcacgggtagcaatgcttgccatttttggaaattctttattacacttggtgcatttataggtataggtaggcattaatagatctcttttaaacttaacatcttaactaaacgggctttgtctatgtcaaaaacacattgacgtgcgcccggatacaacttttcaacttcgtataccatgcagacgaaaccaacattgtgcatgtactcgcgttcatatgcattgaaccaacgagaaaggcgctgtattgactgaaaaccaaagtataacccagcctcttgaaagtctatattatctttttcaaggttgcgcatcaatcgattatcgtcatccggtgctggatgtcggttatcatccatatcaatatagatatcaggattcatacagaattgatccagccattcagcggtatccattgacacataacgattgacatatgggccgctttttgtttgccatttttctgtacaatcattccagaaagaacaagaaaattccacacgatatacgaacatgatataatcctcacaagtaaactcaaggtttacaagtacgataccacttatctaatttttctgcaagcatttcgttgataatttttgcaatttcgtaccgtccgtgagtagtacccagttccaggtaaatcacatcaagtgcgcacacaatcgcatcaatactttcttcaacgatattaccgccgcgttgaggctgaatgagacattcgctgatctcgccaacttccgctgataggtgatgaaccacatcactcttcgtgcgtttcttcactttatgagcgatttcaaaaaacttatcaagtacgatcgccgtttcttctcgcgttgcagtattctcggatgtcgtctccgtttgttgaacaacgtattttgtaaaatagttttcaaacacgttgaaagggatcacatgaggaacaccattcaaaaacaccccttctttacaaacataatggatttggcgcggaatagacaacccgccgctgcgttccaaatgtcgtttaacgcttgctacaaaatcgaactctttcccgtatccagccaacatactgtgatacgtgagtaggccaaatgcaggaacatagagatcattttctttatacagattcatttacaatacctttatggtagccaaaaatataacaatcaattgaaggacgttcaccagggaagtgaatgcattgcatgatgcgttcagccattagatcttctcccatgtataccgaagtagtttcttcgttgtaatgggtatcatacgacgttttaagcgtcatgcccggaagccctgcaatgtgcatgaatttagaattggtgcaaggttttcctacttcaccgttaatcatcaacactgcattagttttacgtgcttttctcatttgaatttcaccccgatttgcgatacgttccattcttttacttcatcaacaatatcataatggttgatgtatggtaaagcaatttttaaattactcgcgtcttgaatgttgcgtaagaaacgagtaggagaaagaagacacaaccgctcggatccgttgtttcctttagcggcaaatgatagggtttctcccccgtcaatcttcatatcaacagaaatcgttttgaattctggtgcatatgacgtgattttgccgttgtctctcggtgtactatagaaacatacactttgtgggacattataacggtctgtttcaatgtacatgtaatcgccgtcagccattccccacgcggtataaagggatccggtatagtcaccaaaggaatttttaaaatcttccttcgtggtgtatcccagcgagcgcaattgcataagctggttatgctgttcgattgcgtcggctttttgttgttcctgtacttgcgcatcaatcgtttcttgccaggaattatacgcatagtaacccacaacagcgattacagccataacccctacagctttccagattttagcgtcttcgtttttgttactcatgctatattccttttaagaaaaagggccgaagcccctttgttaacgaagataaaccacataaccgctttggtcaatcgcgcggtctgcgtcattgaagatattaccacgaatgccttttgctggtgctttccagcttgcaggtttcaggatattaccatcattatcgatgaaggcggcaacagaacgctgattgaacatttcaccagtttctttgttgcgagtatcctgaacaacgcgatgatatttgcggcctttctccagaaagaaaacagtttcgaaaggagaatcttggaaacgagcgttacgcgctttgtacattgcttccatgaaaggggctgctttttctgcgaggatttcgaaagtgttcatggtatatctcctaaagtgtgtttcgtttcgatgtaagtactatatcaaagatggttattctatgcaaggcttttttcgttatccatcaaatattttaagtgttcttttaatgcagggagttcgttcaaatggcgttgcttaactttctcgtactctttgcgttcccagttttcaagattgcttgccaacgcttcatcacaataagcgatcccgcgttctgcatcctgaactttctgtttccattgtgcaactgcttgttgataaagagaaccgttaaccatcataataatttcctcccttgtttcgatggggtaactataccaaagctaccccagaatgttttaacaaaaagtgctattagtaggtatccagtttatacattttgcaccagttcatgaattcttcgaaagtctgagtattaacacgtttttccttcttcactttcttagtgattacaggacggttagtaaaacgtttttgcattttcacagtgattgctactttatcgcccaggtcttctaccttttcaaccagcgcccactgagaaccaatttcagcaccgaaagttaaaccaacaatctcacctgctttaacgtgtgctgcatattttactttaaccattttcgtattcctttctctgtttcgtttcgatgaatacaagataccaaaaagcctcccgcaatgcaagaggctttttaacaaaaagtgctattttatttctttgagcaatttacggatcccaccgccctgtgtcttatcaaagattttctttgcatcaataacagaagtgattatgtggtagttgttcccttttccgtcaaactcaaactcgaccttgtagtcactacgaaatttcacaaaaacaaattcacctgcaaagtgcttacagaactgtttttcgttaatgtccaaccattcctgtgtatcatctaactgatacatgcgacaaaacaggatcgaacccattacaacaatcacgacaaggatagctaacgcaaattctgacatcatttacccctgtttactgattgacggtgtaacgatttaggcacaaccggatttcgatacggtttgactttatggatcatgggttcttcctcaaccaaattaggaaattggttgttccattccatcgaaaaaggataaggttgtgactttaactcttcgatcatacagtttactaaacggtcgccgattacacccaaagccgccccaataatcgctatacgcataaatcaccccttaattgtgtcaagtacagtaaaccagtcatgaagccatatcgttgttcttacagcgatatacgttaacaaactaatcaatgataccgctccgcaaatagccagcgtaatcaacagccggatttcaaatttagtaaaattcatatcaatctcctttctgagaacccaatataacaaaagccctcaaccgaagtcaagggctttgttttaaatttttaccagttttggcaatcgaagaactataccaggatggatcagacgtgcatccggaatagaatcacggttgattttagcgatatcaggccaaagttcaccaacaccatacagtttctttgctatagaatataggctatcacctggttgcacgacatagcgatcagattcaatcttaaccagatcctggttaatgatatcatcaaaggcttttgctttcgcttcgttaatcgtgttcccgtagtaatggcgatccataatagttaatgtgatcatcgtttctttcctatgctgttttcgtctgtctcttctaaggatggaggttcttccagccccagggcataacgtttagcatagattaacatcaatgcatctttagcgcaatcatgaatcgaatcatgctgaatgaatccatctaacatgcctttacgtagtggacacgtggtcactccgcgagtcagtaaacggttttcaatagctgtacgcacatcacggctattccagaacacggtcggcatatcttcaaacgtgtcaagtttccctgtcatagttcgtacaacatcggttagcatagaacgatcgaattcggggccgcgtgtataatcgtatgactgccaacgactcacaccgtcagccgctaaatcagcaaagaattgtcgatgaccttcgtacaaatccatgtcaatatcggaagggaacaaaaccctttgcgcttctttagattgctgtttccaccattcgatcgttttttcatctttgatgcgttctggttgtttccggatgtcaaatttgtactttcttcctttagcaatcagttcctgaaaggtaggcggatcataaggatcatcaacaaacggaacatagctaagttcagctagttttccttttggaaacgggccaatactttcataatcaaatacaaaatctacgggtaaatgactcattcgcgaccccgcttatacgattccatgaaataggccaatgatagcgcgacttccggagtaacatcaacggatttgatcatgtctggagttactgccatcatcccgaactgacgaagcccacaacgagcaatcgatttttccagtcggatcatgttttctacagcctctgcaaaattgtccagatgttcccaatcgtggtaatcttccattgtagaacgatcacttttcaaaatcagatcggcaacggattcagcataaaggcgcggaaggtgaatattcatttaaaacccctcaagcatgtttttgttttcacgaatgttacgacccattttcaaagtatcaatgatcactgcatactcttcaaaagtgaattcgatatcttgtgaaatgtttccccacgtgtaggtcggcccgttaggacagtataacccaacttctttgtttgcgttgacaatgcagcgcaattttgcaaacaacaaattgatatcgatagaattgaacccttcgagataatcaagcccctctctaccaatacggtcaacttctcgcaaaatcttttctacatctttgactttaacaataattttcataataacctcaaagggccgaagcccttagacataatcaacagtgaatcgtgcgcgggtagttcctacataaagcaactgcttacacaattcataatcggcgtatgcgtatgcatcgcgcgtatacatgtatgaatgatcatacgtgcttccctgacctttgtgatacgtacaaaccggaagcgccttaaccgtctggaacttgtttttgatttgccagaacgaataccagggggctttgtatccggtttcctgtttcatctttttatactgaaacgcgacgtagttcaaataatcgcctaaacgttcctgcataaccggatccgcgataacctgaatatccgctttcgtatcctcgaacatcgattctgttttcatcaagaaataatcgatttgtaccggatcacatcggtcagctttgatagtatcagaacgcgggatgatttcaaggattttaatttgctcgttgttgttatagataacttcaacaaacgaaaccccattcacacggccttctgtcactaacggttcttgcatcacaaccacttcaccaacaatgaacggctgatcagttttgtacaagtgtttgcggatcactgcatttaacttgtctacgtttgcgttagtgtaagcaaacatacggttattgttcaggtcatccggagtcttaacacggctaaaataacgtctcaggaagtcaccagcgttttcgtgcttcattacccctagttcaccattcatgaggggcattaacggcttaccgtcgcgtatagcgcgtgatacctggatgattgggtttccttctgcctgacgcataatcttatccatgcgaatgacatcaaaaatttcctcatcaaagaacggtgaaagctcggtgatcccttcggtattaaccggacggatctgatccttatcacccaatcccaggatcaccgcacaactcggaatagtacgcttgatgatacggaatagttctttgtcaaccatcgatacttcttcaaccacaaacacacgacattcagacagatcagcggcttttttgcctttttgctgttcaaatactcgtaactcttcgttggttacggggctgattttcagtgctgagtgaatggtcgttgcatccatacccaccgcctcagagagaacgtttttagcctggtgcgtcggtgctgtcaaccagatcccactaatacccagttttttcaatgtttcaaacacaaattttaccagagtagttttaccaacacccggcccacctgtgatagtagtatggattttgtttctgatatttttaatcactcgatcatgtgcatttttctggtcttcgctcagatcgtcaaaagttaattcgctcatactttaatcaataccccttgaatacttgcgtgttcaataaaccaacgcatatctttctttttcttttcggttacggtttcaacttcttcctttcgaaagaatcggctaagaccactttgtttaactggattcatcttatcatgatattctttgataatcgaatttttatactcgttagcatcgtccggagatagaaacaacaaaggtgttaactctccttccttaatgaagggaattttaaacccgtctttatccttactaacgacgatataatattttgtaatcattctcgcccctcataacaaacgtagaatattccaacaaaccaaaacactgatagtataatcagtaaaagttttctttcaacgccatttacgtgaaacacacaccaaccgaaaagatatgtgatcatcgcgcaaacaccataagaaagaaccccaacagctaatagcatcaaaaagtgccattgatcgatactataaatataataaaggagattatacatgatatcgaccgtaagcacaatagttgttcatgctcattatacaacaactcccgtatttgaaggagatatctacacgttcaaatacacttttcctatcgaacagatagttcaattaatgaaaaatagacatcctatcggatggattaccccagcaacaaaacatctactaaggaacaccatcgatggactaccgtaaaatttacaccaatcttatagaaaaagcaagagatagaacactaaattgttacacagaaaagcatcatatcatcccccgatgtatgggaggttgtgacgatcatgataatttagtagaacttaccgcagaagaacattatgtagcccatcaacttcttgtcaagatgtatccacacaataataagttgatatatgctgctaatatgatgtgcgtcaacgcaacacagagaaataataaagcatatggatggatccgcagaaagtggatatctcagatatcaaaagacaggacagggacaaaggcaacagaagaacaacgcaaaaagatgtcagaatcccataggggagacaaaaactctatgtatgggttacgcggtgataatcatcctgcttatggtcaaaaaccctggagaaatcaaataacaatgaaaggaaagcatgaatggaggtatgctgggattttctatgactggtatattaacgatattaaagctggaatctataaaagacaaggacacaagagaatgctacaagaattgcaaattgcaacaatctcccgtgttcctagaacatcaatcgagttattcaaaaaggggtggaacccttacgaagataccgattgggttgagtgggctaataatcaatagctgttggcccaacgacgaagattttcggcttgtttaagagcgtacatcttataaattgtttctgcatccatacccaatgcaataaacttacatagtacaaagtggaattggtcgatcatttcaaacagaacttctaaacgatcctcttcactcagatccgcaaatttagtattgcgcaattcctggtgatttgctttccacggtttccaaacaccggaagcaggtttaacaccgcgagacattccacccagagcggtatacaattcgcgggtttcatcggcgatcgcgtcgtcttgcagtttcagccaatcaaggatttctccacaagtttccagattatccggacgcggaacccaatgcagggtatcagacaggctttgttgtgcatggttttgtaaatccagcatggattgtaaaggatcgccattacgggccagaaccttttgatattcggaatctacaaattccagatcttccgggttaaccaggtgcgcacatgaattaaatacaggagttttatcagtagtcatatcaatctcattttttcggtgatttgtcccacgacttaaatcgaagttttgccgtgagtccagaaacagtattatctttcaaatactgcataatttcaagtttagttgcgccgtccgtttttatcatttcgttgatatctttggaaggccacgggcatttatcccacattacaaccttttctccagcctcaatcaatttaaagaggcggtgagtagtatccggatgacgtgcttcattgtcaagaacccagacacgcatatttttatacggaacctcagaaagtgcaagctgtccaccagtgatagcgccagcattatcaacaaacaggctatctaatggcccctcaagaagataaaccgtttttagcggatctatcgtatcctgtccgtaaatcttggttgattcttcacaggctttgattgtgatatatttcgactttgccccgtcgcgtaaagcacgaccctggaaagattcaattttccctttcttatcgaagatagggatcactaatctcggttctggttttgcgatcggataggtatccggattcaccgtattaaccagttgttgccattcgcgagtaaaccacaaccgatcccacttgtcacggggaatacaacgattctgcacatattttatgatcggatgttcatccggcaaggtatctaacctttcgcagaattgaagagtaggaataaatttcttctcttcctttggtggttctgtatgtgttggctttaacgaattgcgatccttaaacgattccatgagataatcacggtaatcgtctggataatattctttcaggaatacgctaaacggcacaccataaccacagttaaaacaaccacaattcatatgatcaccctttttagaagggtagatccaaaatcgttttttgtacttgtctttcattgagtcgccgcaaatagggcaacgcgcattgatgcttaatgcccctgatttacgaacgatttcgctttgaggcagtgatcccatgattcgggttgcaaattctatatcaagatacatttcttacctcagttgactatctttagatcctcgtcgattataccccgcgctgatcatttcgtcatgttctttttggcattcaatacaataacggcaacccttcacgatagccctacgtttttcgggtatcggatccccacaatcaaaacaatgcgttaatgattctccgtttctgatttgagaacgtgcaaaatctatcgcattgtctattgttgcctgaatggtatcttgaacaccgtcagcagggccaaatccaaccgccattgtaaatcctcctaatcaaatgatttcaatatcatagactaagaggatttttctgtcaagaacttacttgcttttctgttccgtcaagcattaacttccaaccacgaaacgcctgtttaaacgaataatttattgcaatatcaattttatcagaaccttttcgacgattctgataaacggtcgcgttgtcactcatatacatgatacaaattggaaaccatgtataatcgttagcagtagcccagatagtgatattcagcggaggaattatcatttctttttccttttccctgcacgggtaacgcctaatactttcggcccgatgttggttactgctccagtagtcacaccagaagcaatcttttctgtatcgccgccagaatcacccgcgaccatatcctctaacatgcgccccttatcataatattctttgaggcgtggaacattcaacatgatttcttcatgctcttgttctgtcagattgtagcgattgcgtagggtatcatatgaactggttaagttcataaacccactcatatacggaacagcattcattctacgcttgatatggcgtactgaacgatgaaaaggagaatacgcttctaactcttcttttgttttggggttgcgaattacttcgccttgtccatcaaggatccccagcttgtaagcagaccactctgtgaatggttttttcagtaaacgaatcattcgcacactgtatgttaaatccatattacgaatcatttgatcactcatgatgatctcctttctaaattagtattacgttttatttgttctgttacaactgcttggtgtgcttcttcgggagtaggaaataatcccaaatttatctttttcccttcaactgtgattctgcctctccataacacaccttttgttttcgtttcatgtttggatacaccgatgtaaccgctagagttagtagatggtgcttttctgtttatcgcattcagagattgtgttagttctcttaaattactgataccgtcaccaaattcaaccccacgcacatgatctactatttcaggtagatatccatgaacatagtaaaatattagtctatgtcttctgtactgttcattgttaaattttataacgtgatacccctttgcattggggctaccagcaacatcaccaggctttatctttcgttggttagagttaggagttttccatagcacaattcccttttccgtattaatagacagattagggattaacagatctaatcctttcttttcttcgtcaagggttcgttttccactaccgtaacttttttgcatgattattactctattgtgaaagtgaataaatcagatttggtttcaggttcaaactccatacaaacaacctcgcatagtggtttaacccctttccaatcctccaggtaatacccagtatctataccgcatccaggattcataacgaggccagtttcatcaagaaactttttgcatttacttgatgtggtgctgtcatcttgtcggaaacagtgtgttttcgaataccggaaatttgcagacatttgagggattatgaaagttccctgacgtgcgatctgtgatgcacgttcgattactttatactcaaattctgcccctgtatacttacccttaaaatcagaggttttgattttaccaaaaggcggattactgatcgccatatcaaacacctgattaaattcagttgttaaggcgtctccatgcacccaggaggcttctggtacgatacgcttacctaactcatagtatgtgtgatttaactcaacacagacgatttcacgcggcgtattgtacatcatgtaatgaaccatagcgaaagataacccaccgataccagcacacaggtcaataacacttccacctgtgcaagcatcgattgtgaaatcgcgagcaagtccaataggggtaaagaacgcccctaattcagaattgtttgtaaacgcgccttcatgaaagttttcgataatgaacaacttctcttcgtaagttagcgctttgtcagagtgaaccagatccattatctgattgtgtttcttggtttccgctttcgttaactttgccattttcccagctatacaataatgttgattcgttagggtagaattcccatccgtctacatatccggtttcccaatcagtagtttgttcaaaaccacagatccattcatatacaccaggaggcatttcgacggaatcaggaagcccgatatcttccgcgctgcgtccacattcaaagaatgcatcatgaatgaatggtcgagataataccgtaacataaccttcatcgtcaacagctacgatccagcgggaactatgaggactatcgaacttcggttcttcttcgtctgcgtcagcttttatttcagccttacaaaaatctaaattcatcatttcaaaccctctttaacaccctctttcatagctttccaggtagaacctgcttcaccattcagggcggcaaatacaaataataagatagcaaggacaagattcacgccagcaatcaccatgattttgctatacacgaaaatgtaaggcattgccaccacccaccaactaaaagaattaccagttacgatgttgagtgctgcaagtaagaaagtgataacgaatgcgattttcataatgtcctcctttgttatgattaaggtatcatcttttttgaaagaatgcaatacctatagatacaaaaaagccccgaaaggggcttaattttttatgcgttattgatgagataccgaagaacgtttttcgcttgttcctcattacaaccaactttgaaaccaggttcgatagggaggaagttccagaggaaatcaacacttccttcaacgtcatctttgcctttttccagcatcgctaacagcaaacctttgtttttgatgctgtttacgattgcgtcaaaataaccatcgctgaaatcaacattcgggttcagcatttcgttgtaagggttgttgaatacgttcattttgaatctcctttgtttaactcagtatcttgtctacgtgagttatattaccacaatggagattcaggtcaatacctttttacgattttttgaaaagtttttcgtatttggcttttacccagcgatacatatcttcggccttgtcactggcaagcagtgagaacagcagatagatcgcagcacccaccaacacaacgcctactacaatgtagacgggtaagagaactgggaagagaacccagaaccatgacatttgcgagaagccaaacactttagcggctgcaaaaatcagagttagtccagtcagcagtttgatagccggaataggaatcgttatagtcttagtcatttcattaccttacattctttatggggctattcgccccagtcaattaaaattgaatgtcagattttgcaatctgtgtcattttatcacgtcgggtagattcagcctgtttaatcatcgggccttgtgtctgttctactgttttaggcatagtgttgccgtggtagtcagatttaaacccgtattcgctgttgtcggtatccatccagcgctgattaccctttcgaacttccaacttgaacttgttgaaagtgttcttatcgccataacgggatttgatttgcttgaacagttgcataccctgatcagctaactcttccgtctcgattacagctaacataaaatcagccgtagcaggtaaaccagcggattccgcaacatcacccatactcacatccgaactatcccatgcagaacgcccaacctgtgcgcctgtccacattacggtattagtttcaacagcaagaccgcgtagttcttcggcaattgctttaaccagaatataggtattctcagcacctttaacacgggttgaagtacagatccccaggtaatcgacaatgatcacatccggaacaaactgtttcttcaatttaagctctttcacaagcgctctaaagtggtttgcacctgcacccgatgtagggtactgcttgaccaccaaacgcccaaccttacccgctttaaggcgctccattttgttcttatagtctgcgtatgtaatgttaccttcgtcgatgtcatccatagtcacatcaagaaggttagcatcgatacgcttagagcaaacatgctctgccatttccatagaaatgtaaagaacgtttttaccctgttgcagataatcagccgcaagagaacataaacccagtgatttaccaacgttaacaccagccatgatgatattcagtgtaccacgttccgcgccgcctttggtgattgcgttcaggatcgggataccaaacggaattttcatcgccttcgattggtaaagcatccaccgtttttcataatcttcgaaatagtcatgacctactgaactatcgaatgaaattgctaatgcttcctccatgatttcagggatagccccaacaccaggaagtttcttgttctgttctgccagtggtttttctgcgttagcctggatctcgattgcgcgagaaagagcacgatacattgctttgtctttgcaatatgtttccgtttccttcattagccaatctaaatcttctggcgcatttttcagcgactgaatcgcctttttcgtgtcttcgtagactacatcacttagatttcgtttgtcaagcgcaacctctaaagcagtttttgacggaataccgttgaattcctgtacatgtttatcaatgaggtcaaacaaaacttgtgcattgccttcaaaatattcctttttcagatgaggccatgcttggacaaaatacgtcccgttataaatcaggttagaaaatattgtatcaacgatcattgtattgccttataccaggttgctgaacatcatgaaaaagttgtaaaccttttgtttgaatacatcccataatgtcagcttaggctttgggacaactgaacccttttcaagctctttaatctgtgcataaattgcatcatgcaccagcgggatcaacgcttctttgtcttcgtctggggtactgaattctactttcagaccatgatcccaaaacaccttatgaatataaaccagatgcgcaacacctttttcatcgttaatcagaagttcctgaataacatctttcatcgcttcatcaatataattctttgctttgctctcgatatccatacattgcctcggttatggggccgaagccccatagtttttataaaatttcgttgtcttcttcgatatcatcaaatgattctgggatatcgtcatcatccagatcaggatctgggatgctatcagtgctgtataaatcttccagcgcggaaccatcactgatttcacgatcagggatcttatacttttcttcgatagctttcaagaatggttgatgagtaaacagaggacgccagaattcaacgctatttgtttctgactcacgccatttcttttcttcaacttcgagttcgccagtctcggtattcaggaaagcgcggttgcgccagcctttggttacggtctgtacaaagttcatttccattgccagatccaaaaggccagaatacatactaataccgccttcataggtaacatgcagcgggaattttgatttctctttcacgaatcgagatttttcgatgttcatgatgaaatcataacccactacctcagtaccttctttcacctgttgtttacccaggatgatcgcggtatcagcggaatacattaaaccagtaccaccggaaataactttcttgctgtacatttcttgtgtgtcataggtatgacagatacaaaccatcgggatatccaggtcagccaaataaggcgtaaccatacggaacatgccttttaatgcttttgctcgcgtcatatcctgtttatcgttatcagacagcgcgtcagcaagttcttttttacttgccgtgttgcctactgagtcaacgaatacaatcaccttatcaccgcgttcaagcgcgttaagctggcttacaacgtcattacgcaactgctcgaccgtcgtgatacgagtatacacaacacgatccggatcaacacccattgatttcagataggatttagtaacacctttttctgaatcgtagaacaggcacacagcatcttcatacgttttgagataagccgctacagtcagcaaacctaagttggatttgaagtgtttggacgggccagcgaaaagggtaagaccagaagttaggccaccgttaaacgcaccggacaacgccagattcagaatcggcacacgggttcgcgtgatggtaatattgttgaatacgtcgctttcagaaagtacagatgcagtttggctattcgagtttttgatcagtttttttagtagtgctttgtttgacatttaatttttccgatttattcattctcattctatatatctcactagttaatgaaaggggccgaagcccctagagtttaccagtcaccgaacagatcgtttaaactggcacgtttttcataatcaattttacatacttctgtgatgttagtcaatggactaataacatgtttttcaaacatacccggataatctacccatgccagaatatcactttcgatctctgctggtagtctatttccagattgccacgcgatgcaatcagcttgccacgggtttttatcccttaatggtagaaccattaccttttcaccttccatgattggtgtaacaccatcaataccagcagtgaaacggttaaagaacaacacccctttaatatggtttggtgttcccttgattggatagccagccccatcacgatatttcgaaatgttgttggcagatgatacaccagcaatttccctgtagtcaagttccttatattcttcttcgaactttttataatgttcgtgtaaagataattcaccttcttgcaggatacggcggatcgcttctttcaggaatactttcacagaggtcggagtactcgaacgctgtgtttccatacccatgattttcaatttcggtttttcatagcgagttccttcggagtcccacacgttagccgcatatcgttttttagcagtccagaaacttcccaacccttcggaacccaacggaggcccagaaatgatttcacgatccataaacatcaggtgttccacgttgttcatgtattcgcaaagttcacgataccctttatcgatcattggttccattctttctttagcaaagcgatccaggaagtcaacccaatggttattatccttaaatttagcctcaccaccaacttttgcaatcacgttatccatacaaacataaatggagtcagtatcacagtatcgaacatatgcatgatccgtagtaccgcacaggtcgttaagatattcgtttaccttacgttcaatccactggatagccaactgcccaaacatggtgatcgcgctggcgtttcgtagatcgaagtatcggaagtgttcgttacccaacgcaccataaagggagttgatagaaatcttacggttaagctgtgctgtgttcgcttgtgcgatcttcttctcacatacgcgcttaactgctttaagcatttgttttgtaagagttttcagaactgctttcgattcatcactgaaatctgtatagaaatcaaagtcaggatcgatcatttggttatgtgcgtctgttaagtgttcgagttcgtgcttgatgagttcaagatttcgctcacccgccatcattctttttttccacatcttacgctgatcaaatactttcttgatctctacggggatcacgcctttgatatcacggcggaacatccacccgttaggagaacagctaaattcatcgctagggcgcggcgcggtcttattaatatactcttcaagagcacgtaccgcaaaacttcccataatcgtttcagggcttatattcacctgtcggatgatggaagggtacaggcttgttaagtcaaacgataccatgtatttgtaaggcccaggaactggatccttcacaaatgccccagggtaaggggttttagtatggcgtctgttttccggaataacaaccttatcttcacgcagagagttataaatgatcgcgtcccacgttttcagcggagacataacccctgggaagttaatttttgcatagtacgctacagacagaaccagttcaataaagtttcgtttaccgtcgatatcaagtacgcggataacgtcaacaatgttgtacgtgatgtacagttggtgatcgcgctggcgtagttcagacagggaaccttcatactcaactttatttttaccagtttcgtattccgcgatcgcgtccaggcggtaagatggttgcggggtaaagctgaatttcttatacagcgccataccatccatttgagcaacgccggaaatatcatatcctaattgttcgttgccgtaagcgtcagtagtggttctggcggttactttaccaaatgggctaaaatgccttaccacgttttgaccgaaaatgttcaggtatcgcgtgatgatatatgcaatatcgaatttgtcagagttccatccggttacaataacaggggttcgctctttccaatctttgatatacgcagacaataacgacttctcggtctggaaagaccgataaacaattttgtttaaatcttcttcgctaatgtctttgcgatcaacgttttccgcgcaccattccgcaaggccaccctcaaccagatcgtatacatagaatttatcttcaatgctatcgtaatgggtaatcgcatcgattggatattttgcttcacgtggatccggaaattctggagcggtcacctcgatatcgatagaagcaatgcgaatatgttcgcggttgtattcgatttcattacggtacatgtcagaaatgtaagccagtcggtaatcatccatacctagcgcttccatcccaacatcgcgcatacgctgcatccagtttttagcttctttgatgctgtcaaactgttttttgaggcaaggcttgccgtaaatgtctttgtatggggtttctacgccattcatagcgtgttgatacattacgggcgcatatttcgtcttacgtacctgttcggtgccgttagagtcaacgaagcgctcataaatggtatctcccatttgttcaactgataggtaaaattcattcattggatcttgtcttctccattaatataatgttccattgtaacaccacctacagcaaattcaagtttactcgatgttctaaaaccaacaaaccttctgctaacaagtcacggatctttctcagttgaacaagctggcgttcaagtttaaacccgtcgaataacatgctgaaaatactggaattgacactatgatattttgcttctgcaattccctggttaaccatcatgatagctttgttaaccattagtttcctttccgttactgtatgttcatccagttgacaggttgcgagggaaaccaaatcatcataagcacgttggtcaataacgttatccatacgggccgcgaaaatcttattcatgtaagtgcggatcattgcgcgtcctccattcttttcataaagacttcttttgcttgttggatcaagtccagagattttttaatacgctcatagaaatgagtggtttcaacttgattgcataacaatgtgtactctgaaatgttacgatcgtaaaatccaggaaagtagtgttgtgcatagctgtaagtgcgggtatctgacagattgcaagttaacgataacaagatgtcatcttttacaatcgggatgatcaaagtttcgttggatttgattgaatccatgatttcgttaatagtcataatatatccctctcaatggtgtacacccaatataacaaagcccctgcacgaatgcaagggctttttgattagtgaccgatccggtacttgtacttgaggatccaatctgctttttgcgagtgagtcagtacgcggaagttgttttcttctgcaaacttcaacccagtggttacaatcttaaccatgccccactcttcgagaagtcgcgcaatgttgttccggcgtagttcgtcttcttccgtcatatcgacttgacgaccatcgagtttcaacagttctttaaaatgcacgataaaatacttaccttgctttttcagaatgtggcacgattgccagagcattttctttttgttgtttgcaataccaatacgggttagcgtttcacggatctttaaaaaagaatcgtcgctgattagttgaatttctaacatacatcaccattgtttaatcaatttttccaatttcttttgttcagctttgtttttcacaatacccaacaaagacagagcgacctttgcgtgttttcttttccaatcctcgaacattccgaggtctttaagttcctgcaaatattccatcgctgtacgtgtatttacactgtatttttcgcgaagaatttcgataataattttctcttcaaaatcttccgatagtttagcccatgcaccgaagcgtttagccttcctaacagagttgagataatagttatagtgcatttggtcagagatactaccgcctaccagattcatcacatacgcgttgtatatcgtgtctatgtgctggctcattgcgttgtctacaaagtacttatcatacacttcatcgataaccagcggcgttttaccgttgttgatttcgtctatgatgttaaacaaggtgttttctttatccttgccgtactctttgaccagttcttcaaccttatcccaatctttagaaagccaagcggattcatgcggggataactcttcttcatccagaaattccgccaggctcatgattatgcctcccagaccatagaaagcatcaggttcatcaacagatattgcagatgaatttctttattcatcgccagcccgtattgcgcgttgttttcgcctacaatctggatcagtgcgattttagaatcctgattcacgataggataaatcgtatcagtcaattttccgataaaggtatcgtattctgacgcatatttaataacctcagagcgcaaccctttatagttcttttctttcaacagggtaatgatatgagacacatcagaaccaacgatctcatttaggatcccagcatcaatttcaccacgtttcgagtagaacccgatcgctttgataatagaacgcgcatccggataatgctctttaacaaacgctgcaatgactttagggtcatacttgatattctcgatttcaaggataccgaaacaacgcttgattaactgtttcatcagttcgatacgttcagcatcagacggaacaccgaatttaacaggaggacaacgagaaagcagagcactatgcacaccgttaatgttgttcgccgttacaatcacagaaacgtttttactgtatgcttcgataaagctacgcaagtgtttctgtgcttccgccataccagaacgatcgaattcatcaatgatgataatctttccgcctggtttctgcgtcattgatgaagcaaaacgatccagttcattacgaatgaagtttacaccacagttcgaaccgttgacaaagaacacctcagcatcaacctcacgggccaacacaagcgcgagggtcgttttaccagtgccaggggaatcagatacaagggtcatgttctcaacacgcccagatttgattatgccccgcatagcggctttgtcaccagaaggtaaaatacactcttcaatcgttgttgggcgatagcgctgatcccatgcaaattcatcaggagatcgggagattttaccgtatttggtttcgatgatttcaatattttcactaagttccataatataccttcaaaataaatggtgtaaaagaaaggggccgtagccccttaaaactatcttacttgaatgtgctacttgcttcaagtacgacgacgtaagcaacgccgttatcagaagagaattttgcggcccctttggaggaaatctctactttgtaatcgctgttgatgaactgcatgttatcaatcttcatatcaaaattgaaaacattgtcgccttcatactcaccgacttcaacagagaaagttgattgactttctttgcttttcgcggtaatgaccagtttaccatcaatcggttcaacggacaggtcggtcagtttcatcatgcgagacgctttgatcagtttttcgaaatcgttagcggtaatctggaaaatcagatctgctactggcatcaccagacgttttttcggtttcgggatcgttgttgcgtctgctgaacgttcgatgatcttcatcttgtcgccgcgaatcacgatttcaccagtggaaatatcatgagtgatttccgcgtcagtgccgacgatgttcagcatgttcaggaatgagttgagatcgtagataccaacatcttcatcaatcacatcagcaatttcagcttctgcgtatacaacgctgttgattgatttcgtcatgatgaatgaacctttggtcaacatgatcgaagagttgatttgagaaaagtttttcaggatatcaatagtttgtttagagaatttcatattcagcctttagttttcaataagtgttacttaataagtgattttacaacggtttccgctgctgtgtcaagcatatcagccatttctttaacggttgtacgcttcggatcttcgcgtcgttcgctggtaagtttacgatgttccgcaaccactttttcatcaatgtcacgatagtgtttaaaacgttcctcttgaggcatagctttaaacagttcttttgtttcgtccgagagtttagcaacccaagatttacggacgcggttcatgtagtcaacaaaaacattactttcattcatatatttcttctctaacttagaattctttgagtgggggccgaagcccccgcttgtattacatgtctaacagtttatccaggtcatcatcaccggagctatcagaatcatccagatcgaacggtacgccgtcatcttcgcctaccggaaccgatgcaacaccaccagatgatttcacatcagatgtctgattgtcaaacttagccatttcgttatcgaagttgctcagttcgctatcaaggtcagcggaagcgctggaaccagcagaaccgatcgaactacccataactttattgaagcgagtggtcaggtcagccagcggtttaaattcgctttcagcggtaatcgggcggagatcgctcataccttcgaaaattgctttctgaacttcttcatcgtcgatgtttttgatcttagccggaacaccaaacgaactatcgtcatagttaggccaatcaccaacttttttcgctttcagggtgaagttagcaccatcaaacggacaggttacagcaatacccggttcatcaagttctggattaccgttaattgcggcggtgatcttgtccatgattttcttaccgaagcggtatttgaacaccttaccttcgttttctggagcgcctgggtctttaacgatcaggacgttagcccagaaactttgtttacgaccgatctggctcagtagcttatcttctggcccgtttttgttggctttagccttctcatacagatcgttttcggaaatgtacttacatgcaggacagccgtcataatcgccgtgggtagaggaacagttctcaatgtaccactggttgtttttcttgaaagagtggctcacgatacggacgaacgccagttcatcatcggaacgtgctgggaggaatcgaataacggcggaaccgtttttctgtgcgtccagggtcagtttccattctttctcatctttctggaagccggaaccacctttcagatttgctacctgtgcctggagtttagcgggatcttgacgtttaaaaatgctgctcatattctgttttctcgtttagtttagtttgattaacgtttgtttcattaagtttcgatattttatgatatctttttcagtaaggtcaaatatttttctgtatgcctttaacttaatgctaaagtcagaccaaataatatcatcagctacttgatcgtgtttatttatgatacctaaaaatgagtcaaaaatcaaaaacgattcgtaagatatcacatttgacaggacaagtttgcttatgtaggacgttgatgatttttcgctgtacttgaacaccagagacacggggatctctttcattttggcgaattcgtacacgtttttaacgtcatccacaaacacgttatctagtctttgtaactttcctatgtactgcctgtaaaagacaatactatcttcatcaacatcgcctacccagaaatccggattggctacgaagttggataggaatataaaatagatttctttgaatgtaaagcgttgagctaattttacaaagaaatatctatcctttcgcttgttaaaggcgttttcactaactttgatctgccagttgtattgaaggacatcaaaacgcccctggaaatgagttttcatcgccagatataacttgtatacagacaaaggcacaagccgtgaattcgcctcactatcagcaaacggagctttaaatctcacatgaagccgtccagagtggttgatgaactatgttcaagcgcaaccgatgggcgaagcatgtttcctttgatcgcttcgtcgctaatcttatcaaggatcgcgcgaggaaccgttttattcagcatcgcataatcaatggaattttcatccatccattgtagcgttgcttctatgtaggttgccccctcagaggcaaccaaattttcgatatacaaaccgacttcggttttatttccgatcatgctttacgccttatcgatcatatcatacagttcgatcagttcgttgttttcttcttcgaaagcggtacgggcctgttcgtgatacagtttgaacagcttcccgaaggtttttccgtcgataccgaaatcagtttttgctttggatttgatatccttgaacgtaccgttgaagatctcaacttgagttttcacgttggatgcttctttgatcagttcttttacctgttttgctacatcagggtttgtttgtaaaaattctacactcattttgttacctcaaaaatcactcagtttttcgaacatacgggaaagtttgttatccatgaagtaacgttccattttggctttacttccggattttggagtattatacgcttcaataatcgaattttcaatatcttttggtataaattcgaaatcgcgtagttcctcgttttctttgtaacgtgcggcccattcaggggtcatcaacgttgtagggtcgtctgcctccagccatgcctctaactcagaggattttaccgctggggcgcgttcgccttcaaccttcgtcacaatataatcatttctaattttaatgcaagcgatactatcttttttatcgcctttgatatttttgtatcgcagatcgttacgtggtgaaccgtgcttaggcgttacccattttttctggggaggcgaccattgacgaacaccgttatatttctgtagttgtgtaaagtcgctatcagcagaaaccactaatactcgtctaccttcaccaacagcttttttcgtaacaacagcaattatatcatcagcttccgcgaattcaacctttaatccaagataaggcatattctgacggatttcttcgaacactgggttcaggaagttgttcagacgatcccaatcccattctgattcttcatgttcgatctgacgacgttttttgtagtaccaggccttttgcctacgccagtaatttctgtcatcgaaggcaatcacgatttctggatactcacctttaaattttacaacgttaaaccgtaaagtgtcaagcaccagatgacgaatcatttcgatcgtgatggatgcttgttcctttggtttgaagttgttcattagtgtagcgatggaaatgttagagatatcgatgaccatagtatcatcgggttccccttcatcttgcatcaacttgttcaagttaaacatgcttgcaaaactgctcatatatacctcaatttttcaaagaacggggttattgtagtaacttacgaaatgaagtcaataaaaaagaccataaaatttttgatcaataatacttgatctgatcaaatttatgatctataatttattaattaataattattttactacaatgatcattgtaggtcaagtactaaaatcaataaattttatataatttagatctgatctatagatcattagatctactttaaccttaaataatatagaatgaaatttgattttgtctacagttattatataatattcttaacttcaaagaggaaatatgaatactatgactaaagaaacaaccaatatctacgcagacaatgaaaaattataccctatcctctgtgcatggaaaaagcaaatcgccgaaacaggtgatcgcaaaatgcctaatgagttaggtgctgctattatggatattgcaaacgggctatcacgtcgttacaacttcaaccgttattccgaagattggaaaatggatatgattgatgacggaatttccgctgcaatctcaggactgcataacttcgatgaaactcgttataccaacgtttacggttacattaacaaagcatgttggcaagcattcgtaacacgtattctgtacgagaaaaaagagaacgcgaagaaatataaattcttccttgagcacgtttacgactgcgaagattcggatatggttagtattgcagacgaaggtttcattcaagatctacatgacaaactatctcagtacgaggcttccgccaccaaaaccaaagacaaggaagcggaagtattcccaacattggaagattttctatgaaagcaataattgacttaaacaaaatattaactgatatcgattacgaaattgacttgctaccctacttcgtaaaattagagttgcaaaacgtgggaatcccggttatcatcgatccaactgacgtaagaaactccgatttcgaagtagaagaaggggttttgtcttatatgataaacgccgaaactatgatcatggagatcacttatgattgatgaagagaaagaagtactaaccagtgtggaagaagtggatccggaagaggaaattcgacaaaagatccaggcacgtgtagaagccgacgcattgaagcgagcacaaaaattcattaagaagaaccggactgagatcaaacgcctccgtagacacgcagaggaagccctattcaggggtaataaggttcagtatgtgtatgcggttaagaaactccgtgatatgctcaaacagccgtatacagaggatttcattgatacgatgtggaacacttcactagcatcaattcgaaatattgtagcttcacaacagaagcactaacaaacaagtagccccgaaaggggctatgagggtcttatgagaaagtacttaatgatcggggatactcacgctggcttgcgtcaggacaacccctggaatgaagaaaacctatacaatgtattcgtgcaaatcgtagaacactgcaaagcaaacggcattaccgaggctttccatgctggtgatttctttgatgtgcgaaaggccaccacacaaaccacgatgaaattcattcgtgaacgtattgtgccactactggaagaagccggattacatatctatgttctggttgggaaccacgattgccagtttaaagacaagatccgccctaactcgccgcgagagattcttgatcagtatgattgctttactgttgttgatgaaccgatgacagtaaatcttgatacttctccactacaatcaatcgatttgatcccgtggatttgtcaagaaaacacacagcagatttttgatttcatcaaaaagtcaaaatctcaatactgcttaggacactttgaactgtccggatattatttctataagaacagtaaagcggatcatgggcttgaacctgatttcttaaagaaatatgacatcgtgtattcaggccactatcatcacgctaacgaaggcgctaacgttttctatatcggcacaccgcttaccatgagcgcgaacgatgaggacgaaaccaggggcttctatgagctatcttatggcgatggtaaacgtgaattaactttcattgctaacccagtgtgccaccatcgccggatcacttatccggatcaaaaagatgttgatgttgctgattacaaaaattgctctgttcgtttgattgtacgcgaagttgataacgatttgcctaagtttcaaacaaaactggaagaaacagtttatgagttgaacattgtcgatcgcgtgatcacagattcagaagttgatactgactttgaaatcaaaagtgtatctggattgattagtgagtacatcaacaacatgcagatcactccagaagaaaagaccgaagtatctgcaataatgagtgcattgtatgcagaggttacgagcaatggaaatagttgattacgttaatattttaaacgaagaagggcgatataaagccctttataaaatgtttggatttgatgtgattgttgcagtacagcaggattcctataacgagtatgtgtcattggggttcactctgattaaagacaactatcacgaaacaaaggtttggacatttactgtcctgaatagcatggatgaagattccgtgatatactgctttgatagcacgattacaaacatgattagtgatatatcccaaaggataattgatgaaactcaaatttaaaacattgacttatcaaaatatcttgtcggttggtaacgtaccgatcgtcattgattttgattcagcaaagaaaaccctcattacgggtaaaaacggcggtggtaaatccaccatgatcgaagcgcttacatatgctctctttggtaagtcatttcgcgatctgaaagtcgggcaactggtgaacagtatcaacaagaaaaaatgtctggttgaactgttgatcgaatacggcaatgatgaatataaaatcatccgtggacaaaagccgaaagtatttgagatctggaagaatggcgaaaaactgccggaagattcagccgctggtgattatcagtcacagcttgaatcaatgttgaatattaacctggtgggctttaaacaggttatcgttctgggtactgctggttacgttcctttcatggaactgaaaacaccagatcgccgtaaattggttgaagatttgctgtctctgtctattatcagtgaaatggacaaactgaacaaatcatacatccgtggtgttaaccgtgaactggatacgctttcaatgcagattggacacgtacaacagcagatcgcaacacatcaaaagttcattgacgaacaacgggcaaaagcaaatcagaatacggcgcgttaccaggatatctacgattcccacgtagaaacagcaaaacagattaaagcgcaattagttgaacttcaaacccagatcgcagaatgtgtgatcaatggtgaagaccaaacagcaaatattcaaaaactgcgtgatggctatacacgcctctcaatgaacgtagaacagttgcagcgtcttgaggtgatgtatcgcaagggtggtgaatgtccggcctgtaaacagccaattagccccactcctgaacgcatggaagagattgccgagaatattaaaaacggtactcagaaacttacgctgattaagaacaaacaagatcagctacagaaaatcatggatgatttactaacacaacaacgtacactaaatgggctgaaatccaaatacgaatcactacgcggtacacttcaaaatgaagttgcagcggctaaacgtgttcgggctgtcatggataaagcacaggaagacgtggtgatcgacgaatccccagttgaaaaactccgtgaagatgaaaaggaacttgattctaaacgttctggatttgtcaaggaaaaatatttcagaggtattgttacggatctgctgaaagattccggcgttaaagcgagcatcgttaaacgttatattccttacttcaataaacagattgcgtactatctggatctgttgggtgctgattatcagttcactctggatgacgaatttaacgaatcgattaaatcgctgggtcgtaatgattttagttacgcatcgttcagtcaaggcgaaagagcacgtattaaccttgcattgcttatgacgtggcgcgacgtaaccagtaaaatttctggtgttgatttatcccttctgatcctggatgaagtgtacgatggtgcaattgatcgtgatggtagttttgccgtaaaagcgctattggatgggataaatggtaacgtaattgttatcagtcatcaggatttagatccggaagatttcgaccgacatattgttatgtcaaaagtcggtcgattctctaaaatggaagttaagaagtcttaaacttgcagttatcaaaatgccagcgattcatattgctggcatcaccagatttattgcaatatggacaaatcaactgtttcctttttgcctgggtctttctatctgggttatttctgcaatacggtatatgtgaacgcagataatgtaatgaagattctgttccgcaatatggacaattccccctttctttaggtacgtttccgttcttatgggaacacgggataccctcaaacttatgtttcaatccttcattacctggtttcagtttgcagttgtcgaagtgccaacgagtcatatttccaattatacctgattttccgcaatgaggacatacaaccctttcttgttgctttttggctttactcattcgctgtctggtttcttcggtgaactctctgttcctatgtgcttctgacgcctttttctttaaccattcatagcggcggttagctgttctttcctttgatctattggaaccaactgttaacatatgtgctgcaaaaacaagtttgttgtttcctgggtacatcttgactaataacagatgtgcaatataatgttgacgtgctgtaagattaaccaaattatcatcagaatctgttccacctatgcacttaggtatgatatggtgtgattctgtatatccatcatactgcgtttgtttagcatgttctatgatagagttataaattttgttatagttcataaacatatctcttgtttgatgggccgttagatacccctatttaagaggatgaaattatgttattagaaaaatcttttgaattagaaaccgctctggaaatagatcggttttatctccacaacaattttcttgaagaaaaacatatagttactatgaaagatgttgaggaagcattcaaagataaccctatagagttgacgcgaatcaagaacaacaaaagttctgtttggttcctcgaaaaaatctattgaccgaaatccataaatacagtaaagtagcccatgtaacgaaacgtgggctttgtttttatttgaggaacaataaatgatcactgaatccaaaatgacttatcaggaagcactgaaagttttgggcgcaactggtagcgaaaccagcgctgaaatgtccagactcttcaaacgtgcatccttacgcaatcaccccgaccgtggtggtagcaatgaattaatgcagaaaattaaccaggcttacgacgtagttacaaaaactgggcctagtggcgcacgttctgagactgctggtgatgttcgcgcacgttatgcacgtcaaaagaaagaatgggaagaaaaagttgatgcttactttgtagtggcgaaaaactatttcagcaccaaatttaacgcacaggaatttgcggaatacttcaccaaatacactggattgcctaccactttcaaacaggaagtaacaaaaggtagtcacggtgtttatgcttcgttccgtttcacttctggtgatgcttactttgatttcggtttcaactgcacccctccgaatggacaagggttagccgctccggattcatctgcactgggtaacgtttctgttagtacctttgtactggttggaactaaaaaacataaaatggcaagccgtgattatcaatggggcaaaaacccagataagatcactccggaaagcctgttcccgtctaaaaaactggaaagcattttcagccctgtacagaaaaatatcaaatacaaacgtgctgattaccttgcatcattccgtaagctgttaggcgctgacattagcggaaacgatatctttgttgaagttggtacactgaaagttcgtttctatcgtcacgtattcatgcgcaaaggtgcttatgtgtttagcgcggtgtatgatcctgctgtatcgaagtatcgtccggctgcacaacttcgcggaaccatgttcgaagacgaggacggcgcttgcctggatatgatcgttgatacgttcaaagagttgcagaaactgaaaccgagtgttcaaggcgttgtgaacgcgatcgataagatgaacgcagagtttgcggcggggcatcgttcagcatcttttgttaaacgtgtggctgctcaggaagccgcaccgaagccagaagagaagccaaaacgcactgttaatcgtatcggtaaagaggaatacttcgcagcactaaaagatattggtgctcgtgtaatgcctaccagcggttatgttgaatttgataacggcgctggtgttactatcaacttcaagcgtattgttgtaaaccgtaaagcatactactcattcagtagctttgatttcatgtactctggtcagaaacacattgagtggttgaaaggaatcgatatcgcagaagataccaaaggcgcaagcattagcctactcactgatactctgaaatctttacgtgggatctctgactggaacactgttaagagcgctttagatcaaatgaattctaacttcaaggcgggtaaattctccgcacctcatgtgaagaaggaagcagagcaaaaagcaccgaaacagaaagacgaaatcggcgcacagcctaccaaaccacaggcggctaagaaagatacaccagaagtggaaaaatcacaggctgttcatgcagcacgtgagaaagcgaatatgaacaacactattcgtaaaatgatgactatgttagtcaaagcacagcgcaaagacactccggaagatatcaagaaggaagttgatgcagcaattcaattgtggcgcttgacttactaatcaaatgaactataatgggaactgttaacgcagttccctttttatttgaggaaaatattatgagttgtccaacatggttacgtttggaaaatccgaaagaaggtacacaaaaacgaatttatattaatcttggttgggttccacctacagattttcaaatggctgagattttaatcaacgctattaaagaagtaagcgacacttacgaatgggaaaggctctattttcctttaattggtttgtatatgacgcgaaataaatttgaagaaatgaaacttgctgttattcgcgctacgattattaattcccaacaaagatttactttgaaaaatgcatggagttctgaatgattattcaagtatctgtacagggtgacactctgactgtcaccgaatccatcaataccgctcttgctgtatgtcgtgaccatatctcacaaaatcctccagtgactgagatcctggaaattgatgtttgggatcagattgggatgatcgacgcatcatatggatttaccccgcgagatgaagaactatctcgtatcgaatcatggctgaatgaacaggaaacggaatgaaactccctaagaacacaacactactaacccgcgaaaaacttcactctgttgattggtgtcctctggatatcatgatttttgatattgaatctcgcgtgatcaatgcaaaatatcaggggtgtagtattttctctgttgaattcgagaagattcgcgggtatgatgagaagtacaaagaaaaactgaaagttatgattgaagcattgggctatattgtaactgttgaagacaataaaatgtggatcgcaatatgagcatagtaaaagcggtgtttgcattggggcacgatatctaccacgatgatttcgcttttggatatcagcaaggcttgccgtggggccactgtaaagaagatttacagaacttcaaagaagaaaccgccgatagcgttctgattatgggtgcaaatacgtttacctctcttccgggtaaattgcctggtagaattcattgcgttctgtctggttccggtagttttttgaaaaccaaaaaaggcgaggttgctgattacgtgatccacggtggcgggttgtctgctgctattggtacaatgcaagcaacacacccagataaaaatgtgtgtgtcattggtggtaaggggttgcttttagattcaatcaataataaaatggttgatgaagtagttttgacacacatttacggacatcatgtatataatgcccccgcatttaaacgcgatgtttcgtttactgcttctgaattgggtgatgcattgttaaaatatgaattttctgatttcgaaactcagtacatcaaagaacatgaacgcattgaaaaaatcatagtcgatcgatataaaaaggtataaaatgaaacaatatctggatattattaaacttgtacttgataacggtgttgaatcaactgatcgcactggtgtaggtactattcgtattttcggcgcacaagcccgatgggatctaaacagaggtttccccgcaactacctgtaaaaaactattcttcaaaccgtgcaagcatgaattgcaatggttcctgtccggttcaaccaacgttgaagaacttcgccggatgacctggggtgaaaatagcgataagcgcacaatctgggatgataactatgaaaaacaagctattgatttaggatatgattctggttatctggggccaatctacggtcatcaatggcgttcgtttggttctctttatggggatgatgatagttattatggcggtagtggtgttgaccagatagcaaaagtcattgaacaactgaaatcaaccccagacgatcgtgggatcatcgtttcggcatggaaccccgttgatcttgatgatatggcattgcgtccgtgtcactgtttctttcagttcgttgtaatcaacggtaaactgtctctacagtggtatcagcgttcagttgatgtcttcttagggttgccgttcaatatcgcctcctatgctctcctgacgcatattatcgctgatatttgcgggtacgaagtgggcgatctggtttggactggtggtgatgtccatatctataaaaatgcggttgaacaggcaaaagaacttttacagcctaaccgttcaccaatgccattaccgattctaaaaatgccgaaggtaaatagcttacttgatttagatcaagaattctttgactcgataaccttagaagggtatcataatcacggctctctaaaagctgaaatggcagtatgaaaaatggggcttcggcccctttcttaacaaggtaagagaatgaatgacattaaagtagtagtaaaatcctctggtgtacgccagccgtttgacaaagaaaaaatatacaaagtgctcaagtgggcctgtgatggtcataatatcgatgttcgtgcattccttgaaaatgtattagaactgatccgcgatggtatgactaccaaacaaattcaacgtatcgctatcaagtatgcagcagatcatatttctgttaaagaaccggattggcaatacgtagcatcgaatcttgaaatgtttgcattgcgtaaagacgtttacggtcagttcgatcctatcccgttctacgatcacatcgttaaaatggttgaagcggggaaatacgataaagagatcctggaaaaatacagcaagcaagatattcaagttttcgaacgtgcaattgatcatgataaggattttgaattttcgtatgctggttcccaacagttaatcgggaaatatctggttcaggatcgcgatactggcgaaatctttgaaacccctcagtatgcgtttatgcttattgcgatgtgtctgcatcaggaagaaactgggttagcacaggttacgcatatcgttgatttttataacgcaatttccgatcgcaaactgtctctaccgactccaattatggcgggtgtacgtactcctacgcgccagttctctagttgtgtagtaattgaatcgggtgattctcttggttctcttaacgctgtaacctctgcgatcgtgaagtatatttcacaacgtgctggtattggggttaacgcgggacatattcgcgcaatgggttctaaaatccgtggtggtgaagctgttcatactggtgtgattcctttctggaaacatattcaaaccgctgttaaatcctgttcacagggtggcgttcgtggtggtgctgcaacactgtattatcctttctggcatctggaagttgaaaaccttctggtgttgaagaacaacaaaggcgtagaagaaaaccgcgttcgtcatcttgattatggtgtacagcttaaccagttgatgtataaacgcttaatgaatcgtgattacattacgctgtttagtccggatgttgctaacgatcgtctgtatgatctgttctatgaagctgatcagactgcatttgaagaactgtatgaaagcctggaaaaagatccaactgttcgtaagaaacgcatcaaagcggttgacctgttccaacttttagcacaggaacgcgcacagacaggacgcaaatacattttcaacactcatcacgtcaaccaacagggtagttttacggttcctgtccgtatgtctaacctgtgttgtgagattgcgatcccaacgtcgccgctggatgacgatgataaaatggctggtgaaatcggattgtgtacgctaatggctatcgttctggataacgctgatatcagcgaattcccgaaactcacgcgtattgcagtacgtgcgcttgataacctgttggattaccagaactaccctgtaaaagccgctctgaaagctaaacagcgtcgttctctgggtgttggtatcaccaactatgcatcatggttagcaagcaactattgcgactactcagaagcgtatacagacaaagttcatgagttaatggaagcgtttcagtttaaccttctcgttgcttctatggaactggcgaaagaacgtggtgcgtgtggattgtacaacgataccaaatacgctcgcggattactgcctatcgattggtattgcaaaactgttgatgaactggtagcacctgtttataattgcgattgggaatggttacgcagccagattaaaaaatacggcttgcgcaactctactctttctgctttaatgccttgtgaaagtagttcacaggttagtaactctaccaacgggatcgaacctccgcgcggtttagtgagtatcaaatcttcgaaagaaggacactataaccaggttgtgccaaaccaaaataaccagattgatttctatgatctgctctgggatatggctaaacgcggtaacaaagggtatctgtctcacgtagcagttatgcagaagtttgtagatcagtctatttctgcaaacaccaactatgacccggcaaactatgaagacgggaaagttaaaacagaagacatcattgatgatctgctgtatgctaactactacggtgttaaaaccttgtactatcataatacgcgtgatggtgctggtgatgaagatgaagccgccgacgattgcgcgggttgcaagatttgattaatgccccttcgggggctttttaaaggtaaagacatgttaacagtaatgaatacaaacccagatcataaccacttagaccaacctatgttttttggtgaagatactggtgttgcacgttatgaatcgcagaaacacaaagttttcgaaagcctgacacaaaaacaactttctttcttctggcgtccggaagaagtcgacctgtctactgaccgtatgcagtacgcaaaacttcctgaacatgaaaaaatcattttcgattctaacctacagtatcaaaccctgttagataccattcagggacgtgggcctaacctcgcatttttgccaattgcatccgatgtgagtatggaaacatggatcgaaacgtgggcgtttagtgaaaccattcacagccgtagttacacgcatattcaacgtaacttgcacattgatccttctgtacagttcgaccagatccttcgtaatgaagcgattatgaaacgttccgcatcgatgacacggtattatgatactctgattgatgaatgtcataagctgaaaaccatcatgatgctacaggaacaggttagcggctataaaccaaatgatccggctgtcgtgtattataacgagcaatacactaaacaggccactaagtgcaaagaagcgctgtacctgtgtatgcacgctgtgaacgctctcgaagcgatccgcttctatgtgtcgtttagtttcacctttaactttgctgaacaaggcaagatggaaggcaacgcgaaaattatgcgcctgattgcgcgtgatgaagcattgcatcagaaaggtactcagagtaaaatccgtttgtggcaaatgggtaaagatgatccagaaatggttgaaatctcccgtaggctgaaaaaagaagcaacggctatcttcctggaagtatatgaacaggaaaaagaatgggctgaacatttattctctgttggtgatgtagaaggtgtatcgctgaaaagcactatcgcttatattgaacacctgacagatcagcgtatgcgagcggtcgggcttgattcaccattcaccccgatccctaacccgtatccgtggatgaataaatggctcaaaagtgataacgtacaggttgccccgcaagaggttgaagtaagttcttacctcgtcggaaacctgaatactgaaatcagcgatgaagcgtatgcaaaatgggccagcaaatacgcgtgattgtcgggtagtaaacaagtacaaaactgattgggatgtcgatattcaaagaggtacgaagttcggcaacccttatcacacaggaaccaggggagaaaacattttagcgtttatcccctggttccagaatcaggttcgtactggggcgatcacgattgaagaattgaaagaacttgatggtaagaggcttggttgtacctgtgcgcctcttccctgtcacggtgattacatcgcgcatgtggttaatgttttgtgtggtaagaaaagatcacttgactttttggatatataatgtatgaaatctgaattcaacttaacccttgataaatgtggtcgcatcgatcgaagttttgttaagtgtggtgaacttaggcattgtgtttattttattgcaattaacgatgaaatagtatatgttggtaaatgtcgggatatgtggaagcgtttagacacgtatcgcaatgcaaagtattggagagaagccaaccccagcaacatcttaaaaacgtgtcgattggaaatggctatcaaaaaacgaaaaactgtgaaacttatcgtgactactcacgatgaaaatacatatcatgattatgaaatcaacatgatacgaaaatacaaccctgaatggaataaacagcactatgacaaaggcacaaactaaaattatcaataccctttacaaacaactcatgcagttgtgcggtgaatctgaaacatttttcttcgttgatcaagtaaccgtgatgggtacacctgttcgaatctttaactatcgcatggcctcatatacagactggctaaagcctggtgctctggaatgtcgcggtatcatgtttgaaatgaatggagatacccccgtatcaatcatcagccgccctatggagaagttttttaactatgccgaggtaaaggcatgggaagcgcttaacgagtctcctattgaattaggcgaagttttagacgtgatgattaaagaagatggttccttgatctcaactttccttgacggtggatttctggcggtcaagtctaaaggttcggttaaatcagaacaagctatggatgcgcacagcgtgttaatggcaaatcgtgaattgctgacccgcttaactgagatcgctaaagaaaactatacggtgaacatggaatacgtttccccgaaaaaccgtattgtcgttggttatgattctcctgatctgcgtattctgaacgttcgtcacaacatcacgggtgaatacatcccttatgatgaactctttgctgacgcgctgttacgtgcgtatctggttaagcgtgagaatatcgaagtactggatctggatgcattcgcaaaagaagcatatcagaatgaaggattcgaaggctatgttgttctgacaacgaaagggtttgtaaaaatcaaaacaaactggtatgtcaacctgcatcgcacaaaagatagcatcaccaacaataaggatcttttcctaaatattgttgagaatacggtcgatgacctgaaacagctattcagttcggatctggtctctctgaaaaagattgacgatttcgaaaaacttttccttgatagtctcaatcgtttgagtgcaaaagcattcaaagctattgaagataataaagggaaatcgcgtaaagattttgctatcagtctaagcgcggatttgtcaaacgacggtcggatcatcttcgggcctcttatgaagtacttcgaagaaaccgatccacaaaaactggtcgatcgcatcattgaaatgatggttaaaaattacgatcagttcattcctggagagtacaagtgaaatcatttggcgcatatagccgaacgatagaacaagaaaaagcagggattgattccctgctttctttcgttgatgttttccccgaaactggaaaaatttactggaatgataaagcatatcataaaagtaagagaggaaaagaagcgggttctattgtttgtgaagaatacccttatacgaaaataaagtatgctgggaaaaattacatgaggcatagaataatattttactatgttcatggttacttaccaatcatagttgatcataaaaatggtcttgattttggtgattgtattgataatcttcaagaatccgatcccgttcataatatattgaagaaaaacaaaaccagaaaatctaaaactaccacatcaaaaggggttgactatcgttcttctcgtggaaaatatagagcacaaatacggattaatggtaaaacgaaacatataggatattatgatacagaagaacaggcgtctatcgcatatgaggaaactttgaatgaatatcaaaagcatcttgggtatgattaatataaaatcgtggatatggcctattattgttgcttgctccctaatagcccttttttacattgcagtcgataccaaaattgaaaacaggcaattgtctaaggatatcaaagcgttacaagctgatatcaagaaagtaaaagagacaaacaacagtaatacagtgatatacgtcgaacagaaaggcaaggatcagcagttagtgaaagattccggacgtaaagatctgttgttcaaaaaaccaggactgatcgaaatcaagatcaacaagtcctttgaagagtatatgaaggattacgaaaaatgaaaattgcaacgttagcccttgttctgggcgttctgttggtcgggtgtgctgagaagcccccagaaaagattttgcctacgctccccgctaaggtgaatccggtgaatgtgaaatggaaagtggttgcagaagtccgagagattgacggtaaaaaataccttgtaatgccctatgacggaaatccttatgttgcattatcatatccagattcattgatttttcgtagctggatgaacgacgttaaaagacaaaaggatcagaccgataatgttctgtgtactttgggataccctgagaaatgcaaatcaaaataaccaaaacattttttcgtgacataacagaaggaaaagtttatactgcgaaaaaggataaagaaggtctatggatagaaaacgattggaatcgtgatatatggctcaatctgacgaatgagtataacaaagaactaattgaatatgagatagtgaaatgaatctgtttatgactattggcgttccgggtagtggaaaaactacctgggcgcatgagaaagcccgtgaattgggtaatactgttacgatctctcgcgatgatctgcgtagctctttgtataatgctggtaaaggtgctggcggatacaaatacaccaaagcgaaagaagaaatgattgcagaaatgcaagatcacgttgttatctctactctgaaagatggtaaaaacgtgatcatacacaacacgcatctgaaagaaagtgataaaaatcactggcgtgaaattgcattggaacacaaggcagattttcatattgaatattttgatgtgtccattgttgaattgcttcgccgtaaccacaaacgcggtcgtgatgcattacccgtttcgcgtgtttgggaaatgtttaaccagtatcgtaagatccgtgggttcgtaccagcaatggaaattgttaatccacacaatcagaagtgtgtgatctttgatgttgacggtacgctaacaaaagtagggcaacgtagcccgtatgactttaccaaagtgatcaatgatccgccaaacatcccgatacaacaactgtttcacctgtacaaaaatgcagggtataaatgcgttgttgtatctgggcgtgaaggtaatccgcaatgcgcacatgatacatgggttagcctgttaagttatggtgttgaaccggatgaaatttttatgcgtcaagaaggcgataccaggacagattttgaagtaaaagaagaaattttgtttgacaagattttagataagtattatcctgttattgcagtggacgatagagacactccggtcggaatgtggcgagcaaacgggattccgtgcttacaagtcgattatggtgatttctgattgacatctaatgtgggtatgttaaagtacccacacaaaagaggattacattatgaacgttattcgtgaagataaaggcatcatggttgaacttggtgatcgcattcgcgtagaaaatctgggcgattttaaccaaaaagttcgtttgttgtgccaaaaaattgctaacaaaattcaggaacagggaaaagcaccaggcgggtttgaagttagcgccactccggtttctcagtactcctatattgtgtatattcatgacgtggatactaacagcacccaatctttcgggctggtgttaaatcctattactggctacgttacatgggcggctgtattatgaacgtaaaaattattgatagagcggtaattacggacgaatctgtatacccggatcctcgttattatggcggtgttttcggatacatcaaaggaactgatattgatgtagtaacaagtccgattgcagaatatgatatcaacaaaaatcagacagaagttcgcgttactacaatcaacggttcagaatatatcgttgaagcgactcctgattttatcaaacagctactaaaggtgatgaaagatgcttgatcatcctggctctatgagtatggtgctcctggaagcattaaaagcatatgatatcccttgtcatttcggtgaagtaactgttaatactatcattgacgaaatcgacaacccaaatactttcattgcttgtcttgttcgaaaatttacaagttgttttcgaccgagtccagaaaaagtagtaatcagttctgtttctgctcatcatcgagtgttagatgatggaaagattcaactttactggaaagttctttatcacgtggtgtatcatgaagattgatgatattatgtttatgcttagagcaataagcgcttctaagttctctcaatgtgtctctgttaatgtcggtgctgcattgagaaatggtaacgggcgtgtgtttgtaggcgcaaataatacggttgatcctagtcatcgttgtacagatcagtgcaatcacttattagatgataacgggaaactgagtgaagaaaagcgccctgaacattcacaatggtcagatcgcaacgaagtacacgcagaaatgcgcgttattatgctggcggcgtctcatgaacaaatcaaagacgcaactttgtatacaactcattccccttgctcacaatgtgcgaaaaatatcgaattttgtgttgcaacaggtatgattaagcgtgtagtatatctacataaatacgatcgtggtggcatcgagtggatatggcgtctacagcaatacggtgccgaagtagtacaacttgaccccgaagaaatgaataaacatttccggatcaaataacaaatgagtaaatgtatgtctgaactgagtgtaaaagcatcctttgaatatgttttgattgaaaccaacgctaaagcggctggaactgaaattgtatcaccttctggtattgtgactggtgttcgtcaacacggcgaggaaccgatctacggcacagtgttatcatgtgggccggatgtaccggaagaatataaaaccctgcttatgggtaagcgcgtaccgcttcctcatgcacaaatggcaaacgtgccggatcctgaactgattgcaggaaaggcaacaaaagaagaagctcgcaagtatccggttaaatatgtaaccgcacactataaagcgattcaagcaatttacgaataagagatccaacatggctaaacaaattcaagcaatcatcgccgataccgtcgcaaaatctaaaaaacttttcgacaaaggcgacatcctcgaagcaccgacccgcatcgatgtaatgacttcaatgatcattgatgctcaccagggaaaactaaattcccgtgcttcggaagtaatggaatacatcgtacagttcgaggatgtatgcaaatacgccaaagctgttgatccggctgttcgcgaaatctaccgcaaacagttctaaaaatatcggccccttagctcaataggtagagctaatcactcataatggttaggttcccggttcaagtcacgggaggggccaccaaacaaggcaaggcacttagagaagcgggaggaacagaatctgattctgttggttgtaggtgcaaatcctacccttgccaccaaattagggtgcgtagcgcaatgccgttaaatggttcggaatatgcaacctttctcacggagaaggctctgttggtatccggtaataggttccccggaatgcggggtgaagtaaagaaactcccagcccactaattttaatgaggtttatatgaaatttcgtgaaactgtgaaataccataacgcggtcgaatatacacagatttttgttgatatgtctcccgcaaaattcaaagaacgttatggcatgacatttaatgaatggaaagatggattgcccgatggggactaccgaaaaaacttcaaattcaatgaatgttatgtggatgatgatccttacgatctggatatttttggtaaaacaacgcctctcattgagaattcgccagaacagctttacgaatcttgtattgactctgcatacgaaatttaaagagataacatgaaaaatttacaaaaactgtttgaaatgtctccggcaattagaaaaatcatcggagaaaatagcaatccaacgaatcgcaataaaaaattgatggaactttttgcaaaagagttcgatgattttgattctgaacttcataaagcgcttgaggcatattctaaacaagggttctttgcatcgccgcaagtaaatagcaagaaagagtatagcgaacgattctttgattgggagattgtcaatctcgttcgtagaacaaatatatctcctagcaatcaccaattgatttctcttgatacttcggtattctttatccagtatcttatcagcggtggtttcaaaaatcctgaaattccgtttacaaatgaagcggttagcagtgaatttgatgaatcatttgtatacatcaacacaaacaaataatcaaatggctatcttcggatagccttatttttggggtgtctatgcgctttttaaagtatgcaagttggatcgtactcgtccctcttgacattattactggagtattagcaattctgtttgccccgtttgttgtaccgttctacaatgagaaaacagggcatcttcctaaaggcttccggtggatggaaaccttcgataaccctattgatggtgatggtggacatatccgccgttgggcgtccatacgctatcatctgggggcttttggggtatacatgcagcgtgttggctggttgtggagaaacaaggcttataacttcgcatatcacgttttaggacgtgaagcgacaagcaaattcaactggaaaggcaacccaaaaacagaaggtgggccgaaccctgtaaatcatgggtatctgctcatgtggaacgaatcagcatggggtttgtacgtttacaaaccgtggctacggatccacaaagtgcaattctgtttgcgcgtttatgctggatggaaactgaaacaagaagttagcgacccagttaacctggatcgtgcaatgctggcgtttcatttcaacccgttcaggtattatgtaatcaagtaaaggtaatacaatgaaagcatttcaaattttagaaggtttgcatactggtacgatctacctggaagaaggtaacgacgttcggatcgtagtatcaaaaacattaactatggattctgtgatcggtaaagctcgcgttactccgtttgcaaagcgagagattgagatcgaatatcagccaactgttaaggtggaaggtggacaacatttaaacgtaaacgtgttgcgccgtgaaactctcctggatgcggttgaacatcctgaaaaatacccacagttaacgatccgtgtttctggttatgcagtgcgttttaactcactgacccctgaacagcaacgcgacgttatcgcccgaacctttacagagagtctataatggcaattgctgatatcaagggttataaaccccatactgataaaaaagtagaaaccgtaaatcgtatcaaagatgctgaaaatgcattaggtgcaatcctggaagatatcgaacagcgactatcaaattcagatattgattcgctgatagaggaagaattagatgaggtgcttgaacgtatccatcaaatccaactggctaaagaccgactgaaagaagcctctatgtgggcgtgtcgtgcggtgtttcagcctgacgaaaaatattaaaaatcaagccgttgccgaaaggtagcggcttttttcgtttttggtgtaaaaagttgttgactcctttctcacattcccttatagttaatcccgtagacaagaaaacacttttatgaggatgacattatgaaacgctcttacaacatgaatgaactggttttcttcaaaactcgtcgtgaagcacgtgcttacgttctggcggctggtaaaaatacttctgctgctatcgatatgggtactgataaagctgttggtgctcgttgggccgctgttatcgttatcgctgctccggttactccggttaaaactctggtacttggtgcgcgtcacgccgaaactcttaacaccgctgcaagcggtaggggccacgaagttaaagtgttcaagaagcgttcttatctttcatgtgcaaggggttaactatggcacgattcatatataaagtggaatacgaaaatactgagttatctgatacctttttgaagatgattcgtgatcacgggcaacgtctggaaagagtaacgattgatactgcttttgattgtcctgttgggttggttctaacattatcttgcagccctgcaaaagaatcagcccgtgtcgaaatgttacataaactaaatgcattttatgaaggtggtagtgtatggcgagtattgtaaaatttttcaccgactcagtgaaagaaattaaaagcgctctggaacaatggaacactcgttgtgacgtatccattaaatcagagtacgaaacaacttatgatcgttatgatccggcccgtggtttgcacaataacccccatgaggtggaagtgtgaaatactacggattcaaaacgagtcattttggtaaagcgtatcgcacagaaaacatcgatcgcaaacgtccgtactatgattcgttagtacgagcgggacgtaaacgcgctcgccaggaagggaagaaagagggtgaagatcgtggataactggaaaacatggatatcaattatcgttggtgttatcatcgggcgcggtttgtatgatttaatcttttcaataggggttaactatggacattggttcgggtagccagtacccatcatgcgcgttaagcaactttgcccctcatccatttacgtttgatggggtagaatgtgcatcaatggagggctttttgcaaagccttaaattcagtaatcccgatatgcaagcccatgtgtgtactctggtaggcaaggccgcaaagttcaaaggcaaaaagaaaaaatggtggactaaccagaccctatactggaaaggtatccctattcatcgttcctctgaggcgtatcaaatcctgattgaaaacgcatataatgcgttattccttaatgaagggtttcgccgtgcgctggcagcaaccggaaaaagtaccttgacacattcaatgggaaagaataaaataaatgaaactgtactgactgaaagagagtttgtacgcaacttaacccgattgagagatctattatgagtgaaaaagaaagagtagaatgtgtgttccttttcaaaggcgcgatcaatccattagcgttactgtatgcgcaacatgcattacgttcaacgttgattcaaagtgtcatctataaagcaggtgtgtattatgttaccatcggcgcaaataacatggttgttattgaatcctacgttaaggaatgtgcatcaaacggcgttgtctttgataaagtcgattttgatgctggggtagatgctgtttatatgtataagggttaatatgagttacgtagtttatttcgattgttcggatctcgatccgttcgtgcttcaacaggcaaagaaatatcatcaagatgttgttggcattggtgtaacaaatgatgatatgctgtgtattgaatttgaatactatcgtaaattcgagcgtgattatttcctgggtgaattgaacgcattcaaaagtacccttttctttgatcgttatgaggttatatcttgacagaacttgatgaactcgttgacagtttacgaatagatttcgaaactggtaagtgtttctgggctaagaagataaccaaaaagactgttgttggagaagaagcgggttccgtccgtcccgatggttattgtagaatccggttcaaaggaaaatattactaccgtcatcgagtcatcttttatgcacggaataggtttcttcctgacgttgttgaccacataaaagaggttgacaatggtgacggtgtaggtaatattcaggcagcaactcaccaacagaatatgatgaaacaaaatatcaattcgttgaataaatctggttgccctggtgtatcatgggatacacaaagaaacaaatggctttccactattaaaaaggatggaaagaatatctatataggtcggtttgcgtcttatgatgacgcggttactgcccgaattaacaaagaaaaagaactatttggaaacttttataatgagcacaaacgcaaagcctgtaattctgactgatattgacgggatcgccgtaaaatggcagtcggggttgccgttctttttgtctaagcacaacatgcctactgatattgcattggaaatggttacggatgaaaaatttcgtgatatgaccgaaatcttcggatgtgatcagcagttggctaaaatccttatggaagaatacaataacagttctttcattcgttatctgaatgcgtatgatgatgcattgattgtgatcaaccgtctgaaaacgcagtatgatttcgttgccgttaccgctctgggaacaaccccaacagcaagccttaaccgaattgctaacctgaatactcttttcccgtctgcgtttaaagaggtgatggtcgtgggccacggtgaaacaaaaactcatcgttacctggaagcaaaagcaaagtatggtaatcgtctggtttgctttgttgatgatctcgcgataaacttaaacgaatgtcataacgtcattagtcaattgccgttattccatatgttacgtggtgaacgtgaagaaacaaatgcacctcaccagttagtaaaatcgtggtttgaaattgaagagaaactaaatgatcttgtcaatccttaatgaacttgcgtctactctgaaaaccaaagagaaagaagcaattttaaaacgtaatgccgataatgaattattgaaagaagttttccgcattacgtatacaaaacagattatgttttatgtgcgtcaatttcctctggtagaagggaaaccaggcacaacaccgctttccgatgcaatcaaagcattactggaagatttagcaagccggaaatatacaggcaatgcagcgcgtgatcgtttactggatattgtatcatcagtgaacattaacgatcgtgaagtgctacgccgtatcattaaccgcgatctggaatgtggtgctggcacaaccttaccaaacagggtatggaagaaactcattcctgaacagcctcaatgcctcgctacgccgtttagtgaaaaggctttacgtcgcatcattttccctgcttactcgcagcttaaagccgatggtgcgcgttgcatggctgatttgctggaagcattaaaccgtaaggtatcgagagcgggtaacgagtacgaagggttaactcagcttgatatcgatctgaaaaagattcgcgattatctgggatatgatgtagttctggatggagaattgatttatgttccttccggaaccgtaccaacattacctgaacctgaaacagacatgcctttttctttatctgctttcatggacgatgatgataacgatatcgcgctatttgcggaagaagttcgcaaagtatcgaccccagaagaagaacaggcagaagcaaaacgcgaagaaggtaacgggatcgtaaacaaatctctgaaagggacgatcaccgaagaagaacagcgaaacattgtttatgttgtttgggatattattccatatgaggtgtattacggcgaagctgaaagtgttcagacttatgatgagcggtttagcctgttgcgtgatatcctcctggatctttctctgccttctgttcgtttgattcagtctaagctggttaataacattgcagaagcgaagcaggactataacaattaccgcaatgacggtaaagaaggttctattctcaaaaacagaaacttcaaatggaaagattcgcgagtagccgatcaggttaagctgaaaaacaaaaccccgattgaactacggatcattgatatctacgcgcacactaaagaagaccataaggtcggcgggtttgtggtggaagatttatccggaatggctcgaacgaataccggatctgggttaactgataccgattatcgttacgatgatgatggtattacccgtgtatacattccattagatgaacgtggtgaactggatcgcgaatacatcatggcgcataaagatgaatacattggggccattgtagaaatggaagttgacggcctccagaagtcgaaaacgcgtaagaaaggggaaccggaatacagtttcttccttcctattatcaagaagataagacgcgataagaccgaacccgacgatattcatgttgtctttgcagatctattttaataaaaagcccttgactccggtcgggggctttgttatattgggcctatcgaaacgtaaatcactaagagaatatattatgactagtagttatcagaaacacaaaacccttatggcaaacctgtccggtaaacatatcgacgaagtaaaatctctgctgacagtgaccgaaggttcccgattcgaaacaaatcacattatcaaaccttctgtgaagaaagtactgaaagtgatttaccgacatccggtgtatcagtgcgttcatatcatgaacagcaacgcatttattttcgtatataacgaatccgatgataagtgtgttggtattttccgaaaacctaactttgaatgcatgagcgaagcggctgttgcaaccccgatcgttgaagaatatccggattatgttcaacgcaacatgcgttatgtgcaatcccgacttgattatgcatacgatttcaattctgacgcggtagaagcgctggcggatatcctttgcaaaaaccagaaagatcgtcaaatgacaaaatatctgactgatccaacaccgccaacaattcgaatttctgttgaagttccgtttgaaaatcatttcatggcagttgaagcgcttgctaaacttggtttagaagtgaaaacagaagccgtttaatagcactttttgttaaagaagcctcttgcaatgcagggggcttttttgtatagtgtgttcattgaaacgaaacagacaaaaggaacatcacacgaacttcatcgatatcaacaaagatttggaaggtaaaaacatcaaactcgttaaccgcgaaatgttagagagtcttggtaacggtggcgaaaaattcagtgaagaattctataacaatttatcattgatgacggtcaagcgcgttgatgttcagggtggttccggttgggtttctgcaattccggtttccctggtagatcaagcaacatatgacccagttgcggattcatgggatctagaaatgccgttggtattcgaagaagtcatgaagtgctacgaaatcgcataagggtattattatgaatagcggaaaattacaaatgaaagttagcgaagaagaagttaaagagcggttatcggtagcaagaagattccttgaatctatcgaccctgataaacttggaaaatgccctgatacgatttgccttaattgtgggcgttctgttcttgttggtaagtgttgcgataatccaaatatagttgtgatggaaaaggaacaagtatcccccgaaacatgggatcagatccaggaaatcattaaaaaccctccagcgccaaccaagaaattacgtgaattgatgacaaggaaaatgaaatatgagcaaatttaaattgagtgcaaccgttcgccttattcgttggaatggtgaagagatccgttatgatgaccctgaattcgcccatgaaattctttcgcatcgtctgggattgaaaaacgcgtcattggttcagactgttaaaacatcagcagatccggaaatttggcgttgtgttatcctggatctcgataacaacattgattatgatgatcctaagaactatccgcttctggaagcacaagttgagaatgctccagaagacagacagtgttttttggttgagttgccacgcgaacattacgaaaacatcataaaggcccgtaaaaaggtcaataacaatgttttcgatctccacctcggattgtttgaggattaagtactgctagttgtgttcgtagtagcggcgctggtaggttcccccacctgtatacattcaagtgtttgcaggtggaaatcttttgatacgtctcgaacacattcaacgatcagatattttcctgcatactcttccccaaatacctcaatgattgcccctaccttaacatctaaacgaccctgctttatatcgaaccggatccggcgttcatagctggatagcaattgcattttagacgcctggaacggtttaccttctgaatctgggttctgaaagttggtatcatagattgcattacggtttgtgaagatccatgtattttctgtgtctgtatcagccagtatgtcaccgtacatctttttatcagtcaatgacagactaaagaaactggcatctttaaacagcgttgtgttatccttatgggtaatgtactgggcttctgtgaatatgacagtatccccaacaaacacgttatcaacgttaaatttgtatgctgggatcggtgtctgggccagaatgtcagttgaacttttaaggaaaataccggaaccatcttcccacagataacagaagtcagaagaaactacactttgcccgttgtccctgatataatcaaatatatcctgatatgtaccatttagacatccaggagggatacgtatgttaccgccgacaacttcgggggtaagtagtttcattttgctatacagtgccgtcatacactctgtaatcgtctgtacggcgttgttactaaatgaacgggcaaacttacgtctgaacgttttatgcagcggagagaggttcatacgcagcacagaacggttcttatcgtcagtatctacgttagagtaaagcaatccgtaataatgttgttcctgtgtaccgttatactggaaagatacctgtatgatcggctggataagttgctgatagattaactgtgcgtcgtatatctgcatcagcgtttccgatgagccgttaatcatcgtcttttcactaaacgagacaagagcgggtagcaattcagtatatgcgttatcaatgtatttttcgtatgatgtatataatttaatcgatgtgactcgattgacgattttttcagccataaaaatccctcctaatatatcctatttactaaatagtaaataatgacccaggttcaatttgaggcaataatgaaaaataaaactcttgataaatttatgactacacggcttgaaatcaagaagactaacgttaaaaccgttcatcttccggatggaacagccattgagatccctaagatgtcgtatcgtcattttgtaaagattaagactctgaaagatgacccagttgcgatcatgcgattcatcattgatgacatcaaaccgcgtgaactgacagcagcggaaattgaatttgtgttgatccatatgtatgcacacaataacgctgattatgccaatacgcttaaagaaattgggctaaatcttgatgacctcaaaatctccgaaccttgctatgattttacgtttgacaacgtgcggttagtctttgacaaacccagcctgttaaatgctcaccttccgttcctcatcaaagaggcatatgttgacggtaagccagtagaattaactgaggataaacgagacgaattaattaattgcctgtaccgattcgaatatgatcaggtatcgcgtggtgtcctccaggaagtatacattatccatgaggggaaaaccatcaaagggcttaacatcattggtgaatgataatggctaactcttatttcaacgaagaacaaaagaaaaagtttctgaacagaaacagcaacaaacaaccagcggtcaccaaagtaacagcctcccttgatgctgaaagcgcccgtgacctaaaggaaatcaacgataacacccttgaaagtgcaatcaatactcttgatatcaaagaagggttgaaatcgttcgaagaaaaattccgtgacaaattcgcggggttcaaagaacaatacgaagaggataaaaaggaatcattagccgaacaactacctgatttcgtcggcccgatccgtcctatatccttaaccgatgataactcaaaaactgttgacaatacagtaaacgttaaccaaaatggtcagttcggtaaactggaagaaaacaccgaatctatttttcatgctattaacaaacttgttgatttatatgaaaatactgataagcataagccgcttcctgaaccagtggaagaacctgatccgtatgtagacactaagaaaaaacgcatcaatgatgatgatgacaaaagaagcaaaactctggatagtattgctaaaagtctggtttctattaaaggttttacatcgcagatccttagccgtttcattggttactctctggaagcaatggcaaagtttgctaaatggacgctccttattggttcgttaatctttacattcgatgtgttgcgcgtcacaatacgcaaatggttcgaagatatcctgaaagaaggggaatcctcaaagaaactatttggtacatatctgggtaacgtaaaggctatcgtaacaaagatcgaagaaggtttgaacaacttcaatatgaacaacttaggcgaatcacttcgtgatttgttcgttgagcctatgaagttgttggggcaaactgtacaaacggcaatcactgagggtatcggtcgtcttattcaatcattgggtgaatcaactggcatagacagcattaccaatgccggacgcggaatgcagatcaccgctttacgtgataaacagaaatttggtcttgaattgactaaagaagatattcttatgatcaagaaacaggaactagaagaccaaaaagcggcattagaaaaagaagataaagctattgcagcacgtcatgcattaacaataactccttctcaaattcctaatggttctatctataaagttgctcctactgattatcaagaaagaaatcagaaaaccgtagatgctgataaagaacggcttgataatatgaagaaagcaacggaagaaatgcagaaacaatacgatttagctaaaagcagcgaagaggaagcacaaaaattagccgatgaggaaaacaaacgcaaccgcgcacgtatagaagaagcaaaaaggttagaacaagcgaggaaggaaggaaaacagccgccagaaggtgaagagaaaaagggtgatgatctgttgggtaaagcaaccaactatgctaactctgaaaatctggatgcagccgatatcaaatacattaacgatgaactgttggatcagcttgaaaaacgtcgtaatgaaggcaatctggacgatgtacagaaggatagaatctctgaccttatcgagcaattgcaaaacaagattgcagcccgtacagaatccagcgccccgatcgacgcacagccaccgttagcagcaaataaaccggatgctgataaagcaagcaacattcaggttaacaacaaaactgttaacaacaacgtaactcattcagtacaacgcacagagcataaaccgctcgtagcgctggcataaggaacatataatgaagttttctattattgatgacagtataaacactctcaaaaatattaaaaatcgcggtatcccctctgggggtgccgcaatcacagaatcagtattaaagcaaactatcgttaccgccgaatttccggcccaacgtgcagcaggtatcgataacgcttataatgcttcgagtctgtataataacggccttctgttcactgcatatgattttaatggtgttggtagtaaagacaactatcgttcattacgtcaggcagcacagaacccaaaacaaatactatcatctgcgacgggtaatgttaagtacaaacaagtgttgaatagttctattggtactatggaacctgtttgccagatcctgctaccgcgaagcctgaacgataacgaagtaaacagccaccgctatcaagatgcaaacgatagtttcttaaccaaagggttgagccgtgttgtttcaaacatggtatggggcgctgtagaatccgtttcaggcggtattatggcagaccgaagagaagcccttgatgttggtactaaagccgctttccagggttctgacaagcgaacaaagatgtattacaatacattcgtgattgaaagccgtaatgatttgctggaactgattaaaatctactatctgtttactgttctgggatacggtacaacttctggcggtactgctaaagaagttgctgcattggttaaacagtattacggtgttctgggtgctaaaaccgctaacgcaattagcccttccagtaacccagtaacagcgtcagattttgataatagtctgggtaatgacgtggttgatttcatttcaaacgtagaggttattaaatcgcctcctgtctggtttattcgtgatttccagtctggggattccttgcgtttacctcattcaacctttgggccagcaggtattaccagtgttcgctttggtcgttctattgataatattgtaaatacattaagagaatcaccaaataccccgatctcacttgaggtcgaaattcaatttatggaactgatcgatatgcgtcaggattctatttttgatacaaattactaaggagatatgatgttttacaacgtagatgaatttttatcaggtatggctaatcgcgattttcagcgtagcaacctgtttagcgttgtatttgcaaccagccctgcatcacgtatccttgacaacacgatcggtagtattcgagatactttgattgatggatctattagttctatcaacgcaaacaacccgaacgaattcattaatgctatcactggcggtgtgagtaaattgtttagttacaccgtcgataaggcgattatgtcgctgaacaaaacaggatttagcaaaatcatcggggcaattagcccccgtttgattacttccctgtttggtgatagcatgtatggacaactgctatctgaattccgtgatgaaatgatgtataatatgggtttaagcattatgggagttaacctccctggtaaatccattgggtacgaatacgtttataatggtggcgtacctcaaatcagattcactcgccctgagaatggggaattgtcattgacgttccgcaccgattcagaagcccgtaacctgaaaatctttaacgaatggatttccgctattcgcgatgatgtaacaggacaatacgccttcattgatgaagtgacaagtactattcaggttaacttacacgatcgtgatggttcaccgcatacaacatacgtatttcagaagtgcttgcccgtcaaaatcagtaacagtgaattgagctatgagaacaacaacgaaatctggacatttactgttgattttgcctataaaacatcatgggttgttgaggctgataaagaaggctgggaagggttcaaacaatccgtagaggaaggtttagccattgcagcacgtaccgcaattacaggacaataaaggggctacggccccttttgaggatcttatgtttgatattattcgagtaacattaccatcagggatcaaacgattccctatgtttacagttaaagaccagtttaaattaatgctgacccgtattgatatggaaggtcggccccttaaagagcaacaggaaatactggatgaagtgctggatctgctttatcctgggtattccaaaacagaacaggaatacattttcagccgggtgtattgtggttcgttcggtaaaaacgttatcaaggttgtgataggcggtaaaggtgggggccactccgaagccttcatggtgattaatgatattcaactagaaaatgaatacaagttgaatgatgaaatcacattagggtttaacttcccccgtacacgcaatacaagcgaagagttgtttcttgaatgtatcagttatgtaatatacaacgaacagcgctatgaatggacatcactaaccgaagaaacgaaagagaatattcttgatatcgtcgaacttgatgatgtcgaaaaaatcgttactatgctaacgaaatcggttgatgtgtctatgcgcggtaaatcatttagtggtatgttaaccctgttcaagatattgtttagtcgtggggatctggatgaatttgtgaagaccaactatctgctaaataaaaacggcctgaacctagaacctatcatgaatagtagcccgatggaaaggcaaatttatactgcattgcttgcagaagacttgaaaaaacaaggtgctgttaaatgagaaagcatgaatataaacacgttgagaaatataatgttgattatcgtcctctgacacatacagagtttacccccaatgcagattttatcaaaggggatgtttacctgtatcaaagagaatatcttttcattctggcacttctggaaagtaaaaatatcgatacccgtcaactgttcatcaactgtgaagaatgtcaggaaagaatagaattccagcttaaacgcaatcaaataatggttgaagatttcgacgataagctatacggcaatgacgggatcgcgttatctgttcaccctcgtaagactggtgatgaagagatccccgatcttatcgattacgtaatgatagacggcgaacagatcatgtggagtgattgcagcgacaaagataaagaaatggtattggatgcaatcgactatgcaacctataaatcgatttctaccgccctggataagccagcagtggtcgcaaacattccggtaaggtgttcgtgtgggcatagccatatcgtctctctgagaggcttacagcaatttttaaaggtggtctaaatgggtgtaaatctgaggttgctatatagcgatatagaacctaacatgcaacgagattggaataatgacgtagcggcttcaaaaggggccgcagcagtaagaaatagtttgattggtatcgtaaccacgatcaagggtacacgtccatttgatagtaactttggttgtgctattagtgatatgctgtttgagaacatgaaccctcttacagcggaatctatcagaacatccgttgtgtctgctatccggacatatgaaccgagagtatataatctttctgtcgaggttatacctctatatgacgataacgcggttactgtgactatctattacagtattatcgacgatccggatgatgtagaacaaatcaaactccaactttccgcctcataacaaaaagccccttcctttcggttggggctttcttttagaattcaatgaatcccattagttcttgatatcgcaattcaaacggggagatataactttgcatctggttttgatcggatacgatgtaataatacacctcatcattatcatcatatagcgcttctttgatgatgcaatagcgatcggtttccacgttcacataaagagtatccatgtactttgtaactttggaaccctgtgaactgatttcacgaatagcgttatctatgaaaagcgacaatgcttgcatgaagttatcaaactcaccatattcacagcccataatagaaattgcagtgtattggtgccagcctttgattgtgtctccacggcggatccatccaatttgtctacccccgatagatacacaccacactttaccaacgggactataaaaccgcacaacttcttttaataacagggacatgaccccacattttgtataaggactcatttcaacctcatttcatatcaagtagccaggaagggctagtttcaagcgaaatcgcagtatattcatattttacagtataacctttgaaaccgaaaggaataattgcattttcattgagatattttactttatgctttgcttcttcttcattcagagcagcacagactgttgtttgttcaacgttaccaacaggagaagtaaatttttcaatgatgatgtatacgcagttcatatcgtttccttatttcagtttctttccggttttgagttcatattctaactcacgaacttttattcgtaaagtcattaaacacacctgattctgactgtaaaggtattgggttataactttggttttaaacttctcatcgacttcggaatctttgagccaatcagacatcatctgatacgtagggaggtgttcgcacttctcatcgtctgacatcgcatcatacgttgctttgtccatcgggggcggttcctcgaacgcgagagcgggggttgcgagaagactcagtgcaagtagtaaatatttcataacgtattcctcattgttttcgatagaaccaatatagcaaaaagccccgaccgaagtcaagggctttttcatcaatgcaagaaagatttcacgtactgttcgatcttttcacgacatgtatcaactgaggtgctttccgcaattacggcatgacataacgcctcgccgccgacccagaaactcatcatgtactgaatatcacgaccttccatttctttttgatgcgctttgattcgttcgaaagcattttcgattgtttcagtagcagtaagcatttcggattccccgtcaacctccgccagttccccatcgatcatttcgctttcgacttcttcccagtatactatcgttatcatgcattaccccagtggttaaccgtcgtaatccccgccacaattcacatcgccttcaatgaacagttcgcggttatcacgtaataaattatactttctttcgagttcaggcccgaacgcgtcggcgtcttcataccagctataattgtatcttccgcattcatcatcatattctggttcatcaccgcgctcgttgaagtgaacaattttaatatcgtccatccccagttctttcagcttatcccagatatacgaaatctcaacgctatgggaaccgaacgcttccagtgagatcgtaccgtcgctatcgacttgaggaacaccccacttcgaacgagtatcatcggtgatcatatctattaatgactcaatattattctcaccgtagatatcagcaacttccttttctttaccagggcgaacaagtccgatcccgataataaagctactgcttgagctattgctcacaaacccagaacgaattttcatcgcatcaccatattaccaatcatgaatagagggattagcgcgaagacgataccccatagaatgaccttatcttcacgacggtcgcacccatgatagataacacctccagcgaaaaccaatacaacaactgaaacgaacgcgaataaagaaatcatttgcaggtatccattctcatagaaacttctttcaggatcttattcagatcgtgaagcgcatcttttacgttaccttcgttataggtaagcatatcctggtacagccctttcaagcaacgattgattacatatgctttttcagaaggtaacattgtaccagagcgattataatctctgaaaatgtccatcatcgtgccgttgttaccaggtaatgacgggttgaagttaaccataccggacatcaaactatcaacatacacaactgttgtgttatcagaacgatacgcgccaccaactttaaaccagttgctgaacacatacggagattcccgcacttcgctcaaatcggttccgatttcatcgatgtttacacgaatgttgttaaaatacaccgattcatcaatagaaccatgacgccataagatagcaccattgttatttttgaatccgactacatcaacctgccagccgttatctgttaaccggacatcatcaacgacgatgaaatcaggtagctgtgaatgaaagccgatgttttcaggacgggaattacgaaacccatcacgattggagaaataaaggatgtcaccttgattaagttcgcatatattcataagatttttaaagtccaattcaagtaattccacaagtcacctcaaagccccctttcgggggcgagatctcattagagtttaacttctttttcttccagaacgattgtgcaatcaaatttcacatctttccagaattccgctgcaacgatatctgttgcggtaacgcttacgctggtttcttcaaaatccagatccgcaaaccatgcgtgtccgacgacaataccgtacattacacgactcaggcgattattaagggcgcgaacctctttaatagtttcctttgtctgcttatcaagatactcgatcaggtcattcttgtcaagcgcttcgatctctttagatacagtatcataagcccacagaatgatcaggtcaccattgttaagtttcttcttaccttcggcgcgttttgcaacggtagccgcaacagccggaagtgatgaaacgcctttgattttcacgttcagttctttcgacatgtaaacatcagtcgattctgtgcgctcaaccttcggagagaagccgtaatcacggatcccttgctcagacaaccattcaccagccgcctcaccaaagcgctgtttaagcccttctgcgttgcgtaaaccaatcgcgttatcacggaagaacttcattaccttctgacggcctttcaggatttccagacggacgttatcagcaacaaattccttaccagaaataccgcgagtcatcgaacggttaaccagaggcagagaggtaaagtcaaccagtacagacatacggtcttcaccaattttagccagcggcttgatagtcagaccagaagcacgtaagtttttcagagtcgggatatcggtttccagcggaagtaccttaacgttcacgataccatctttaacaatggtaaagttacgcacttgtttggtttctactttttccggcaatccaaactctttttgtttgctttccggaatggttacgtaaccttgcagatccgtattgatagaaatgttcggacgggaactgttacccaccaggtgtttcactgcaactttcgttgtagtttgggtaaattccggtttccatacttcgtgcgctaccagttgagccgccagtgcttttcgttcttccggagtagaagcatttgcaatctgttctgacagtttatccagtgtatcatcatctttctggacagtctgacggcctgtgcgattgtacgcccaatgttcagaagacaggtcgatcactgtgtcggtttctgccagcagttcgagagcatcaaccagagtaaacgcgttttcatcaggaaccatgttgtaatcaacaccatccatcagacgtttagccggatcaacaaccgcttcggagatcatatctttagcgttggaataatcctgtttggtaaagcagttatcgtatgctttaatcaggcgcacatcacccagctttttcagaactttccatgccagatctggattcatggtatgaagcgcatgatacagaaccacatacagaacctgttcaccttctgctgttgccggatcgaagccgtcaacgtcattgatcgcgttttcacccagcgcccaaatgtttttgatatgttccggaaccagaacaacaccatttgcagcattcaggacatacacacggccttcatccaggtagatcgcatgggttgcatcgccaactttgacttcaacacgtgcggaggtttgcgcggtaatgatttcatcaaatgcaggtacatatgcatcaaacccttcaacgaatttgtgtaatgcgttggttgcttctgccattttttccagcagaggacggtttacataataaccatattccaggaaagcaatgttgttaaacgtcaacggcagagtagaacacgctttcaggatatcatcagtacgccagcagttatcataaccatcagtcaggaagatcagactgttcagattaccattatccgcttgcagatcggtagcgacttcaaccgccagttgcagaggttcaacgaagccagtacatccggtcggacgcagataacgatcgatagcatcattgattttgctcaggtcggatacagagctaaccttttcgcccacgaatacagaaccgaactgaccacggctggagaaatacagaatagatacggtatcatcctgtttaaccagcgttgccaggttgtttttcaggtgctgacgaatgcgcgggagttcgttatacatcgatccggatacgtcacaaacaaaaacgtggttagtcggggttggtttggctacggcgtttttgaattcaatgttagtgatcataattttctcatttataggtaaatttgattaaaatttcgtttacttttttgctaataatatctaatgcatcatcgcatccaaacttactactcaacaatgaaacaaaatcatccatcgttgttgtttgagactcgccaacgtcaaaagacagagcgtaggcaacaggatttttaatccttacgatttgaatagtatactcattcagatcaaaccgttcaagatattttcgcaaagaaaataaatcaattggtactggtagagtttgactaaaagttatttcttcccccagttgataggggggcatttttacacagatttcgtattccatcagtgatgactcttcatagtgtgttccagattacggaaaatttgcccgtgttcaagctgggattgaaattctccgcattcatcagagtaagtaaattcataaatgaatacaccgttctgattgccaaatttagcgttgtactcttcatacaaccacatcttgatcagagcgtctttctcttctgtttccagattataccagtcacgcccatcataagcaagcgcaatttgaggattagaccgatatcgagtttctgcgctatcttcggtttcccattcataacgcttatcatcatagtatgattcgaaaccatcacccatatgaccacccaggtcgcggtgtacttgctgtacaacttcttccgctgtcgggcaagtcatccagctataaccacagttaggaacacaatcacccatcatttcgcggagattgttgatatcagtcggatccttcgggaaccgtacaataaagctacttgatgaactattgctcacaaaaccagaacggattttcatttgatttcctcaaattcaaaagcggtgaaatgttttctttcgtcatacccaacagtacaacgatgcgtttgctttccggtaaacccgtcaaacacagttacacaatagtaatgcaacgacggaagcggtgtatgtttaatgtatttgatcgcgacgttcaggtcaacagtagaacatacacaatcacacgtttgctcaaaacggtcatcaaaaatcaactcaatgctatagatgttcatttttcacttccttcatgtttttcataacttcttcaaaagttacagggatctcgttgtactgttgcgattcttcatcccatacatcacgatgcccgaatgttgaactttttgcaatgattttttcattttcccatacatcaatagtaacatgatcaccaagataagggaaattaggaactttgttcagcgcatcaacgcagttttgcaatgattcagaaacatgggcaatttcagtgaattcataatcagcactataagaagctacgtaaatcatcaccaccccctaacgatgctaaccagcagtaaacccaggatccagaccacagcaaccgcacaaatacgggccattactacatttccgcgactagtccactccgcactaagaaacaagaggacaaaagttaacgcgtataaaaccatttcaataacttcggtaatcatataaacctcacgaaaaagcccctttcggggcttgtttaattaatgcccgaacacaccacgaatagactctgcgaatgcatacagttcaggatttttagctttcactgtttcgatttgctccagaatgtaatctggtttatatttcgcaccgaaccagcagtaagagaaagagcgatcccacatgaacacgttatagtattcaccgttgcgaacttcaaccatcacataaccaggattagaacccagcgggtaatctttcagaagattgaatttcgcgccagcaccagtacatccgttaaacaggtcattaaaagtcatggtatgttccttttgtcagtttcgtttcaacaaggtcactatactattctttgttatcctatgcaagatttaatttagcaaattcgccaaaatgttttatcgcttcctggtcgtatgcttttgcagcctctaattcatcactataagaaccgatatgcttaaccttaccatcaaccattatctgtgcaatgtaacgtattccggttggttgattgcgtacacatacacccttgaatatgctggttccttcctttcgccgtttcctgttctgagagttgcgggattggttcgcttcgcgcaagttatcaatcccgtcaccagcctcaacaccatttttgtgatcaatcacatcaggtagttttccggtcgcaacgtagtagatgattcgatggcgtagataccctttgcttttgaaataaacgcgggtatatcctcctttgatcttcgaaccaacttcctttccgatcaagtcggaacgtttatgcgatgttcgtataatctttcctgtgtggacatcaacagaaacagttttgaggaattcatcaattcctctctgttcttcttcaattgttcttaatccattatgtgacataacgccttcttaatttgttttgctatggcttcaatcactgggatggaaactgaattcccagcctgtttgtaagcctgtattttgctttcagggatgataaacgaatccggaaatccttgtaacctaaaacattctcgcgggcttaatcttctagggttcttaccttcctgcaataccagacattgaacaccgtcctttccatattgggctgttatcgtcccagtacacacagaatcaactgtaacggcctgatagccaaaccccttgccgtttgccttgtttcgttctttacgctctctaaagcccttccaggcacgatctgatatggtgtattgatcattatccggttcgagaatgtcaccgacccttgttggggtacgtggaggaacaggaaagctaaagaacaccggatcgcgaaagcagacaataaacacacgctctcttcgttgaggcaatccaaaatcttttgtattcattacctgataatggatatcgtatccttcgtcctgtaacagcctgtagatggttttaaacgtgttgcccttgtcatgggttaatagctggggaacattctcaaagaacagcacagagggctttttagcccgtataatgcggagtatttcaaagatgatagtaccgcgaggatccaacatgccctgttttaaccctgctttactgaacgcctgacaaggaaaccccgccaacaggatatcgtgatcgggtacatcgttttcatcaatggtgaatatatcaccctgaatattttcatcaccccagttatcagcatatgtttgttgtgcatgtttatcgatttcagacgttaaaaggcattcgaccccgccgaatgccttatcgaaaccgagcctcacgccaccaacaccagcgcaaaggtcaattattttcatacgtcgaaatcaacctcatcgattttgtatgattcttcgccaatatcagcccatagctgaatattcacactttttgcatcacgataaagagattgaccacaaagcccacctgtataacaagtttctgtaatctcgttaacttccaggcggaggctattgcgcataattttaacaacagccttttccattgccgaatctagggttttagtatcacccaatactacatctttaacgttcaaaataacatcactcattatcgccactccgtttcaattccgtgtttgtatgcgtcaacgcccagaggggtgatcactaaacacatatcagtatttttcgttggtgaactaaacgccattgatgcgtaacctttttgaatcagggaatcacgccctgatttactgggaacatcgttgaaatctaaatccaacatttttgacgagtatccgtaaagtttacacagaacatcaatttcagcgccagataatttcggatatgtcatttatagtacctcacaacatgttcagaatacacacgttcaatgaaatcattccagaaatcgcgatcaacttctttcggataaccagatacagccgccagcttttcaacttcacacatcgttgattctagcgcctcttgtacggttgcgaaaggaacaccgccagctttaaccattttcaaaaatgcactatccggaagaggatatacaatatcaccttctttgaaaatctggatcaattgcataccaccgcgcaacgcatgagaaagagctttccagtcgatcccgttgttggcttctgcttgccgtgctcgttccccgtattcatcccagagtttatacacggattttttcatttccgctacggtgatcgtagactggaatttacgccccagaacttcataaaattcctgacaacctgatttcagtgttttgtctgtaacgaatcgacaaaactcgttggtcgggaatcggttagaaatctcaccaactttgatgcgcttgccgtaattagattcatccacgttacccagcaatgatgtaccataccagtaatcgggaatcatttgtaacacatcaacaacttcacgcagtgccgccaggcgagaacctttaacaccatacttcgccgcttgcttacgaacataaccaaacaggccagttaattccgtagtgtagaagcgcgaacggttagcgcggagatattgccagatatcagagttagcgatcagcttgctatcatctgcatgaagcatatcaatcgccacggtatcaccatcacatgcgaggctaataaacttttgcagactgtaaatctgacgatctacgtcattaacatcgttctttgagtttttatcaccagttgatgtatcgatagacttcttcgcagtgcctaacaggatttcgcgaggatgagggagatagatccctttgtagtctttatcgcttgttggtgtttccagtccgtacaggtgagaaccgaatacggtttccataatcattttcatcagaattcaacctttaatgtttttgcgatcccgcgcaattcagcggtagtaatatccggaatgtttgttccgtagctattcccaaatacttttttaatcttatcacacaaatcgcggcgatacaccatttctttgtattcttcttcgctacgatacagttgataacccatccacccctcagcccatccggaattgcgcttgattttaatattagtacaacaatcagacccatcttccggtcggaaagatgcatacaggtactgacgcgcaactttttgtacgtaaagggttttggggttgcgattttgtcgctggtcactacggatcccagcatcatacaacgtatcaccaactttcacatcacttaaatcaatcatttacgtctccagcaattagttttttcacagtaatgaacgggaacaggcacacccaacgtttctttactgcttctgttgtatgttatcacaacgaatcggttttcgccacccctaacacactccagatccaaaatctcgcgggttcccttcgtgttaatgtctgcaacataatattcttcgttgttgacaatcactatatccgacataatcaagcgaggtttcatgcagcgtacacctctgattcatcgacccattccagatcctgattgagtgattcaatcagctttttatcgcgtcgggaaatgacaacggtagaacctttgtcagctttcacgatgatgtcaccagaagaggtgatgtattcaaccacataatcacggcgagggcttccgagtctgtcaccaactttaacagcacgtctaaccgattcatgagatttttcggtgaacactaatccatcacctacatgggtaacaataccatcaacagcagaacgagaattaacataaattttgctaatctccgccatgaaaacactatctctcagatatcgagcagtcactttatctaaacactgagaagatactttatctccgccaggatatactgagataatcattacatgaccctgaacacgggcggttcctactttatgcagaatgtaaaccattgaaccatcagaatctttagatacaaggatcacgctgaaagattctttgtgttgcttctgagtttctccacaggtaaaactcacgtccagaaaatcaccaactttaacagcacggggttttgctacttgttcacgagcactaataacagggatcataatcatttcctcacagtttcaaattcttcatcagatttccaatatacgttaaaattacgacaatcgtgttcggatgtcaacgtatatttttcatttgttttctcatcggtgataaccatagtttcattatcgattgagttaacaccgtaaacgaaaacattctcaccgcgtttgtttaaaaacgcatcacccttttcaatcaactgccaacaggcaacaggcaacccacctggacaaatcggacgggtaacaagacaatagggatgtttcataataagcctcttttgtttctgtaggcccaatatagcaaaagcccctgacctaagtcaagggctttgttttaaattccggtaaatgctacgatgatttgataatggtcatcgaagaatagatcccgcatcgcgatcacttcgtgcatcggtagccagaacgcgtctgctgcatcatcagagccgcccataatacgaggtaatgaaccatcgttattaggttcgagcttgatatattgtgctacagtcggttttgagaagtacaccgaacgtttcggatgatcaaacagcatcgaattacggatagaaccacgaataaccttttctggtactttaattcgtacttcttccagcaattcacggatcgcacaatcaaggaacgtttcgttaccgtttttgtgtccacccggaagcgctaacgcatctttaccaggcgcaaacttacgacggattactaacacgtggttattacatacgaccactgagtcagccgtgcaacagttcagagaatccggatacggatattttttgaacttgtcaatctctcgttgccagtgtgcatcttcatgggacaaacgctggaattcttttgtttgtgtccattcatcgataaaggaaaccgtagtgctaggcgcatattttaacaaatcttcgtcccagccttcatgatgttcccagataattttgcgtaaattggtcgaggacagatcctgatctccaaccttcacaggttcaaccggaatatgattccatccgaatgctttaagccagtaagaatctttgtctttttcgtacccgacgatcgcaattcgatcatttcgagtttcatcgattgccatacgaacacgggatttccatttttcctcgttatagaggtaatccggaatgtacgcgaatttgattctggctgcatctccaacatcaagtttgcagatagaccagcgagtgatcattgcttgacgctgtttagcggtcaatgggtttaatgtgttcggatatgcataagcagaaccgatcagaatgtaaaccgtatcagcaacagcaagggcttcccttaccattttctcatgaccatagtgaaaaggttgaaaacgtccaattactacagctttatcatatttgtgtttcataacgtgctccacgtttaaaggttaatcataaaacagacgcaattatcaacacaccaaacaatccaccaatgaaaccaaagaatagcgaaatgattgtagtcagtacgatctgttttatgttcattatagtattctcgttttagatgtcaagcccccaaagagggggctttaaaacattatttacgagaatcaaaaatcactttaccagcataatccgaacccattacagtttgaggtacgccacctttatagcgggtagagtagttcatctgtacatccagttctttccagcggatcatttccggtgtaatggtgcgttgcagggcggcgttggcttctgcttctttcttcgctgcatacagacgggcatcagcatcacgttcgttagcgattgcggcattttcacgggcctggcgatcagcttccgcttgttttactgcttgcaatgaagtctgttctactttttgtagttcagctttagcagcgttaacctgttcttcgcggatcttcgtgttagttacctgttccatgataacttccggtagggtgatatcctgcaagaatacctgtttcacagtgtaaccgtaaggccgtgcataatcttctacttcctgctgaatcgcaatttgcagttggttttggatcttcgcatcaaacaggtcttgcgcttttggtacggatttaccaaattcgcgaacagtggaaagcagtttttcggttacatacttatccagtgcctgatcctgattacccgcgttgatacggttgatcggtgctttgctaccgtcgaattgcagcattacggtcatatccacagtggatttaaatttatcctgggacggaacctgtaatttgtcgaacttcatcgcgatgtctttggtactgaacgtatcaaacgttgccagcgggtttacaatgtggaaaccgggcagtacgggtttcggtgatactttacccatgaaggtttcagttttaaccgtaccgtcttgcacaatggtatacatgttaggcactaaccacagtgctgcgactacgcccagagcgatcagagaggttttcttcgggttgttcacgatagtgtttaagttcatcataatttccataagttgttgttcaattcgatagttattctatcatcacatttcacgctgtcaaactatttttaagaaagttttgtcagcttgtagattgtttgatagcacaagcccttaatctcgtccaggatgttcttcaaagaactatctactgattcgtagatctcgtttgcttcgttggctattttacggagatacgccaccgtgtcaagcacattttcggtttttagcacaggtttgtatcttcccgtgattcctatgtggatttcggtgaatttatcaaccaaatcctgcatatcttcgtaaaaaccctcatatgctttatgttgtgagtatgaacctgttgcaaaatgtgcgctatgcatataggtaacggacataaggcacatgccaataaaggcatctatcttgcttgagttctcagattctgtaatttgtttaaatgattgcatgatgatccctttatgaacgatggatacttgcaaactcatacgcgaccctaatccctagctttgcgcattcggattcagatcggcattgtttttggtgccattttcgttccatgtagttgtagaatagttcgcttgtatttacgctgggagggatcgttgtgatgtatacttgaagggccgcattgatataatcgtcaaattctttctgaaccggacggtcggcggcgtgtgttgtgggtgtcatcatcaacaatccgaacagcacagccattgatatgcgtttaatgttcataacaattactcttttactcatagacccactataggtctactcctgtatatatttatagcaaaaacgaggccgaagcctcgttataatatttttgctgtaaagtcaatcaagtaatgtcataccaacacaaacttctttcgaaagcgcgtattttgttcacgttttctacgttttcgtcccaaccgatcacaccagctttcatacgtttcagttcctgacgtaaacgggtacgtacttttgaatcaattttctttactgcaatagaaagcattgcattcagatcgccatgagctttgttaccgtcgcgacacagattattatcaaatcgaatgtatgcacatcctgatttgtgtttccagttggttgagtaccaacgcaacccatccggatcaataccatgttgagcataataacgagaatactcttttacttcttcgatcttttcgttagatgaacggtcacgaagaggattgtatttcttacggtaagtgcgactcataatgatctccttttgttttatgcttccactgtatcagggttgttctttagttgcaagtaatgttttcgacaaagtgaaacatatttgtcttcggccccgatctcaatctggtcgccattagcaacaaatttgccatttgcatcaatacgggcaacggtagttgctttctttccacaatgacaaaccccccgcaactccctgatctcatcagcaagtgccagcaacatataagaaccttcaaacaggttcaactgaaaatcggttcttagtccatatgtcattacgggtatatctaattcgtcaacaacccgacacagatccatgacatttttcctggaaaggaattgtgcttcgtccacaaacacacaagaaactagtttctggctgtcgctataaaaatgattgttgtgaacatcataatataagtccatatcaggtgtgatcatggtacatgttgcttccaacccaatacgcgaagagatactctgtttaccttctcgcgtatcaattgctggtttgtacatcaggatccgcataccgcgttcctggtagttgtatgcatcggtgagtaaacgagcactcttgccagcattcattgatgcataatgaaaatatagtttagccatttatcctctcaacaaaatctggggtattttggaatttcccttccccttcatggtttttgcatgttttatttgaacagtagatccaccaatcccactcatcataagggggtttggtaatgttcattacacaaattaaagggaaatgacaatcccgacagcgaacattttctataatgtttgcgttagccatgtgtataaccgcccatttcgctatcttgtgcttgatgaatatcaagataccacatattgattttgcttttcagttcgtccatttccttactcagacaattgtcaacgatacatagaacattaacagtttctttacgttgcataacgtcgatgttattcgctttcatcgcttgcgccaatgcattacaggttttaaccagtgcggcgcgttgtcctttgattacggcgatccgtttgttcgctttcttaatctcccgacctgctttgataggatccatcatgattaattcgccttacgaggatcgaaatgaacgacaatgatcgggtaatcgccagtcacctcattaataatgcgcttaatgagttcccagtctcccccagcgaggccagcaccgattaaaggtgtgatgataggctttccagtcttaacggcgtcagcaagccctacagcctgtttaaaagcattgccgattgcgtcataatcgacacgcggcccaggtgtccagaaatcatattgagtatatgcattgaaaacaatgttgcctttttcgccaatgtaaacagaacaagttccgagcttatcacgggaaccttttaacgtattggcatcaacttgaaatgcaccaggaatacgatcgcggatttcgcgagcaataccagcgcccatattgcaatagcagttgcatccgtggatcaaatggccttcaccattcagatacatattgacagcattacctttcacttctttaatgatcatttttattattcctatataattcacgttcaattagcatatcgatgaaatcagtaatatcatcaaaccaatccttagtttcttgagcatgagccaaatcaccatcatctaaaaacttttcgcgagcatcagcaaacttatctaactttttatagagttttgctttgtctatatcattcataaattaaccttaattattaaaagaacgtaagaaaaatacgtaatgtcaaacctgtttacctttccgttcacggcggcgatcttcttgatgacacatatataaaacaccaccaaaaattataaaaccgataacaacgcctataaagtatccagcactaaacatagtcatcatccccgcaatagtaacaaggcccagtgctctcatgcttaccagcattgtacgccaaaaacaccacaaccgccgccataataataaaaatccagatagccattagtaaagccctatgccagcattaaattcatcaaccaaataagtacggaacttttcacaccgttccttatttggcgcttgtttgcatagattcatcattggttcagactgcaaaaactctttttgtttcagcaacttaccgcgtttatacaggtgagcattttcctctccccacatataagcaacatctaactgttctgcgatcacttgcttacataccgcgacatctttgatatcacgattgttgcataactcatccaggcgagcatcaccagcgtgagcaaatccagcaaccagagttaaaagcagtgctaactttttcatgatgattccttattcatcctcttcgataggggtataataatgcgcattgcagatatacgcaagaacttttttcagagacatatcagagaatgtcggatcctgatttcgtctcatcccactaccagtttcaacagcccaacgtttgttagctggattgtatgtcagccagtagcaatcccattcagacagagtatgttcgaacagatcgaaacgcttacgcccatttgcttgcggccttacaaaaggttcaaccatttctaaagcggttaacactcgattaatgttcgaaccgtcttcatccatcgcgatccgcaaacagtattggttaatgtccggatccataccatcgatacccagaccgatagattcgaaaaattgtgtcgccgcgtgataagacacactagaagaacgatattccaacatcacggggatcttttccccatccttgacgttgttaatgatatcctgatcgataagttcaatcaggtctcttttctccttgttcaaggtagaaatttcttcttgcagcggggctatctgtgcatgaagttctttgatccgttgatcaattacggttacttcgaaagctaaatttctcattgtacccattccccgtttttgtcaatgtacatgatccaatcagcaaccgcccaatgggaagtattgcctttcggagtcgctacgatgtaggaaccagctttaaacagtacgcgtttagtttcgttcaggatcaggtcgctcataatgtattcctcatttaaccaaagtgaatcgtgattcataagcatcgttcgggcgctcatacacagtatccgaacttgtgatgacagtatacacggcttctttcacaagatccatgattttctgtgattctccccagacattgatactaaaatacatcccatttttaggaatagggttgtattccatatcataatacatatccatgagttcacaaatgaacaagcggcgctgttcatcatcataagtgaagtacatgttaaagcaatcaagagatttgctcaaagtaatttctttaatagctatgttatcttgtttgctcaaatgatcacggatcgcttgcacacaacgcagcaggttagggtaatcatatttttgtgaaacaatgacttgatgtgaaacgctcataatgtattcctctcaattagatgcactcataataaaaaagcccccgaccgaagtcaagggctttttgtcaaatgatttgtttttcttctaacagcttcgcggttgtattaaccatacgagcataatcacgggcttctttctttgtatacttgaaaccagcgttatagctcgccagcgcctttttcaagtcgcctttgtggtaatcaagccagtactccagttcatagatcgcatacttcgatccaccttgaagagtttcgagctttttgattactacgcgtttaggatatgacttatccattcgtgcgctggcgctacttgcggtaacttgccagcatccataagcgtgatggccttttttacctttaccgacattctcacatgcgcgagactcgatccaggcaatagccgctaaatgatagcctaaacgtttagccttatctttttctacaggttttgcagtcttcaaatcatagttgtgtccaactcgataagcatactccaaaacctctttctgcttcggtgtaatgttatccaaatccttgatgtaggatggagaatttttgtttgccggaggcttcacagtagccttttgtaaaggcaattgatgagtaggcaaatccgcaatgaaatcccctagcggatccgtcgcagcgttgccagaaaaagagcacaagaaaatgctggcagcaataataattttcttcattttaatacctatgttgcaaaaagaggggcaataatacaccccactttatatttatgcaactattttagatagttttcgcgtcacgtagtttatcggcgataaactcagcaatgttataatttgaaatagccttgttaggatcgtatagcgcaatgatttcatctaacgataccataacggcatgtttaaagtagacgctccagctagtagtaaggatctcactgttgtcaaatccacaatcagggctgaacaatgcgcggtatttgtacccactgtatttcgtcagacgatttgtgctgtgcgcatcactggtgatcagaaaagtcccctggtgagtttcaacaacgaaaaagtatccgaggcgttctttgttgtccagcatcttttcaaacttgcgatcggtttcttcgcgaacaatacgagaagtcagcatttccaacactttatcgtattcgggccaatcattctcgatcacgattgcatcaaacgggttcttaccattaatcccgcgcccgatttcgattttcgtgcaaatttcgttgaacgttttcaaatcttctggtgtcagttctttaagatcgctcaattttgctacataataacgtttttctagtttcattttacggaaacctcaattcaaaaataatttcacagagttaccacatttagggcatgtgataaattttttcacgacataatcagcagcagagaaaaatccattgtaaatcgattctctcttttgctgtatatcagatagttcgtattctaacccacttttacagcaactacaaacagtaattagtttttggctatggatgacagtaatcatatacacctcacaaaaagggggctttcgcccccatcattagaaattgtcttcgacaaacgccgcgagacgggaacgatacactgtatcaagaatgatatggcttgagtgttcgtattctttcagcttttcaacagcccatacaaacccgttgtttacggcagtgtttcgagggttgtcgatctgcttaatgttcccgcatagtatcagaagtgtgttctctccgcaacgagaaatgatagatttaatttcatggttgctaaggttttgacattcatcaacaatcagcacagaacctttgcccggatccggatgaccaatactgcgaccacggaaataatacaggctagggaattgcaccacccctttttcaatcaaaccttcaatgtatttttcagattccggattatccttaaacagaatgttcaggctagtaatacaaggttcgatagaaggccggagtttttcgcccagtgtaccaggaaggaagccaatttcacttgataacgggctatctgacttcacatacatcaagttagcgtaatgtccactattaaccaggtgcatagcaccggaaacagcaagcattgttttaccagaaccagcgccgcccataatggtagcaacatcgatttcattgctcataatggattcaacgaaagccgcttgcagagaatcacggggctggatagctttcatgagtttgcgtttcatcgcctgttcgtgcttaacaggtaagacattcaagcaaatctcatcagcagtcaccacacgcccgactaactcaccatttgaggtaatgtactggttaggataaaaatcttcgtcaggaagcgaactgtaagtgatttgggctacattatccgtatatcccaacacttccacagtatcccagaaatcagggatctctacataaccggaatacaatacatcgctatcttttaacgtatcgtcgccagtatactgttctaccttacacccacgggacattgcgatcagcaacatcataatatcgcgagtaactaaggttgcatcctgctgcatacaagtttcaatgattcgttcgtcttgcttgtcaagagcaaacgttttgtttccgacataatcaaccactttaagggtgatagtgtcagacagtgctgggtttgtcaggtttaaaggaatacctgatttcgtaatcgcatcatatgactgaccgaaaataacttttgacagaagccggatcgccaatcgtgcttcgtgcgctgttcgttctttcgttttcaggtgatctaattcacccatagtagcagaggtaataatgatttctgtaccaggttgagtgaatgaatagattgaataggggttactaatcaaaacattggtgtctaatacgtattttgacatacattaaccttatgtggtttcgttaaaaaatgcaccgaaaacctcttttgctttccggttataaacggattttgcttcttctggagtgttatagtaccccaaaaattttctttttccatctatgtttatctgcgctttgtacttcccattggctttatgataagaaacacctttcaaccctgtactactgtttgagttacatttctttttcatcgcattttgctggttcgtcgctttctgtaaatttcttgctgtatctccattctcaacaccatatacatgatctacgataggaggaagataaccattctcaacgtaaaacactattcggtgtcgcaaatacatagaacctttaaaatgaatttgggaatactcgtttttgcttccggcttcacttccaggagacatagggccgcgctgaactttccaatacactttacctgtagatgtatcaacatctacaaaattcagaagagattcgatcccttgaatctcttcatgtatggttcttgatgaatagccatgacttttcattacatacccagcgaaattacgtgaatatatgctaatggatgtttcttttgtacacaatgcatgagtgtattatacacaatgtccatgcgttcattgcgcgtaagatcacactcatcaaaaataaggtttattgcctggtgctctattcgacgtccacggaaatgattaagaattgcccctttactggtcaatacatcacatccggtagcaccatttagctgtttggcgtcttgtgctgcatttaacgtatgcgctacgtaaatgttaagggaactatgggaacgtttcataaaatcaaacgcgcctttagtcttttgtgttcgtctacccagatccagcctggtttcgaataccataaaatcgttagggccgtaattatgcgttggttcttccaactctcgcataagatgcatcttacgacattcttcaattgtctttacataaaattcactattcatgttttacctttaaggggccaaagcccctttgttacgctaattccacatgcggggcatcaatgaattttgtttcgatcggaaggttcggatcatttttccagttgataccaaaacgcagtttaacacccagttcatcacctgcttgtttaacagcattcaggacaggcaaccacactttagggtttgtttgccagccttgaggcaacacgctaggatacagatccaccgcatcacccgtgatgtgttttgagttcattgtttgagatacacccttacggacgttctcgcgctgttgttctacagtacgcagaccttcacgtacaccaaaatcaacaggagacagttgcagagcacgttctacgactttcaccagttgaggtttaacgcctttaaggttgttaaggcttttttgactgaatttaaacataaaatcacctcttgtaaaaataccctgtttgggtacacagggtatttatggtttaagaggttcgataattaataatcgtaaagatcaccgaagcattcttcaaattcacgtttacgttcaatttgctcgtttctacgctctttcatatcaggaggaagacggttttcattgacttcatcaatgtaagcctgtgcatcctcttttgttagaaagaatgcatggaaattgtatccgttgtacccgttcatactacgatcttcaagagagaattctgtgtgacagtcccagtctttgtacagggtaatacatttagcaaacagcccaataccgcgatgaatgtatgggaatccagtaacaatcatcttgctacccatttccgcattttctccgttcacacagaatacttcatacatgatcgcacctggtttaacatctttcttaacagcacgtttttcaaaagcacttttcataatatattcctctcaattggtgtaactacagactactagtttattttctgaatgtcaacaaggtttatcgttttttgacggaaaagttagagtgaacaaacgatcatgaaggttgtcgatccgttcacaagcctgtttcagtatggttttatcaccatcatttgttgtttcaatgcatccaagttcatcggcgtcaatgttcactacgtcgctcatcaatgaagcaaacacgttagcatcaggatgtaacagttcttcgatttcggccttcatgccgtcgtgttcagaaaggatatcaataatatcacgggttaaatctccctggtacgggaaccctgtttctaaatgattgatgatcctttgtgctttccgccattgccatttctgctgttgccggaatagccagagaatattcatacttctcgatcaacgattccagtgtacgcggttttacgggaatgtcaatcattaaaggattaattttcatttcaattccaccgcgtatacatccaattcaggggctttgtgtacgcgcatatctttaccacatacagcataagccggacagttacggcaaccgttatgatccttgttgccaatcaattcatgacggaatttcttagttttcggatgttcccagatatctttgataaagtcactggcttccagtacgttaagcccttctgaccatccaccctcgacccaacgttcagtaaaggaacaagggaagaattcacccttctcgttgatgtacgagctaaacatagtagcttcgcaatcttcggcgtattgcttgtactgttcgaagttcgggtgtccctccatcgcttcaacgaaagcgggggctgaacagctatcgaatccaaatcctacaccagaatctaggcaatattcaacaagttttttatattgttcgcgggtaacggtgtcccagttcttaccgcgtcccttttgtttcagtcccaggaacacgatcgcgttaacttgtttcaggcgcggatcattcttcacagcgtcaaccacgttaaacgcgtcatcataggttttagagctaaccatgaaatgaaggttgatttgctgttgtccggcttctgcaagattagccactgaattaaacgctacatcgaatccagcatgtttgtatactgataccgcaacagccccagcaacagccgctaaacgcgctgcaacgtcttttgatacatcagcaatggtaaggtttggtacaatgcctttagaacgcgcataggccatcatatcaaacatatcagggtttgtttgtccctgtgcatcagcaccgagggcgcattgtgttaaccagggcattttatcaatgatagatttgaatgtatcaagatccatattgaaaccgttagggttattagacttgtagcagaaaccgcaaagtttaccagcagggccattgcatttagttgtgatctcgatatcgagaataaaaggaaaatgactataaataggatcgtcagcaggagtttttccccaagtcatcatatgacctgttttcatatcaaaattaaaattaacctcttcggaacgatagattttctttcctttcgcttccagtagaagtccaacaggcgttttgatatgtttggcgtttactttaacgtgtctcataggaacctcataatgtattacgtttacagaatcacaaatgttatagagaacaagcactattatggatcaagaaaacctaaaaagtcaatgcttgcttccgacgatttagggaaacactatttcagtagttcccgtgatagtcatttcatccaagatcagaaggaaaatccaggacactacaaatataaagtaatcgtatctgggttgtcaagggaaaaggcgatgaaacttgagaaaaggttacacgaaatctataaggtggacaagaacccacatttttataacaaacacatacacaacagtgttgatttttcatgtacaccagaaacaggaaagaagatttcgcaaacacaccagaaatatgcagcaaagaaaatttcagaatcacataaaaggcgattcaaggaaggtatagcatcacataaaggagagaataacccacgatacaacgatcatcggtcttataaagagatacacggagaagaaaaagcggatactatacgcaaagcacaatctgaatcaagaagaggaaaaggtaattcccgcgcggttacgtggaaatttacttcccctaatggagaagaatttttagttgaaggagaatgtaaaaagttttgcaaagacagaaatatttccatgcgtaaactgaaaacctatctgggtgaagtcatcacaacatgcgataaaccctacgatatctctaagaataccgtaggatggaaattagaaaagattagttgaatcttcttttacgttcgtcagccagttcttttttgtacgttttaacgtacttcccgttaagggtacgaagttgttggaaaaccttgttgcacaaagcacgtttcgctttgtattccggcgtattgcggattgattcgatcgtcatacccatttcgtttttagggtacgcgctcaactccctgccgatctctctgtgccagttgcttaactgatcacgctgtgctttgtactcttcaaaagttaacattataactgatctccgtaatcgttcgctgcatcttcgggggttgcttccagtcggtaaagctcaacggctaacggactgggtttgatttcgcggttcaggatctcactgataccgcgaaggaattcgatataaggacggaatctcattttatacgtaccgcgttaaaagcctggttccggagatcatacgctttttcaagctgttcagtagtgaacagaggactatcagtgttagtggtgaaactgcaaatggttttgttgtcggcgttgacttcttcgacaacgatttcataaccccagatcccgctgtactcacatttcacgttccggtacttgatgtaaactgctgcaacatcttcttttttgtagttccggcttttgtagatgatttccatgatatcctccttcgtttcgatgtgtgtaatataacagaacagggttatcgagttttagcaattcgtgctaattataccattttcttagcgattttccaggaggctttgaacgccggaacatcttcaatatcaacccagaaaccagatccgaaaccatcactatagcaagggcaaccgtcgcagtagttttcccaggtcatcacttcaccaccaacagaagcaccagtttccatagcacgtaatgcatcttcaaccttttccagtttttcggcgttgtcgtcgtaaatgacaaagtaccatttacctttgtattcgttaccaagtttgatagcttcgcgaacaagtttcatgatgatttcctttttgtctgtttcgtttctatgtgtgtaatataacaaaaccccctcaccattggcaagggggttttgcaaaaattatcgtttgattggggtattatctataacccgttgaatttccgaacgcatcgtagaatactggcacaattcggtaagcgcccgatccaggtgcatcatagcgtaagaaaactcttttccgcatttgtcgcatctagcgtataaatgtaaatgaattcgcccgatcccatctacctgactatatttctggaatatgtaaggatctgcacctcgatagccagttgcttgatgcttacactctcgtttgaaccatgacattaataatatccttgtacgttgaagcgatcacataacaattttcttgtttggttagtatcgctttggatagaatgcaacatagcgctgatcatgtttaggttattttgcatcatttccgcgctcatgagaacttccatacgcgcacgtaagcgtttattttcttcttccaactcaaccatacggtcatatgctttgatgcgctctaagggcatatcaggacgctctttgagtacgcgagcacgttcaacctcacaagcatgatttgctttccagtggttcgattccgcttcaaatttattaagacggcggatctcttcaaccagctttttgatcatgtatggatccatcatgtcgatgaatttcatcaagcagttggattttgttttgttgtcagcaccagaccaagaagaattatacgtaactgtaaacgcgcggcccatttcatcaacaacaccgatcttgttatcatcggtgattgtagccgcccatttctcccgcatggctgtacaggttccgctggcgacattatgcaacttgtttaatgtcgcatcatcaaatacaatttcatcactcatatatgcctcacatagatttcaaaatacgcagaagtgcgttagtaaagatatcaggaacacaaccaccaaacaacttatgattcatcagcgctaatttcatgctgtgattttcagtatatcgcccgttatggatcccccaggcaacgacattaccaggttcatgaataactaagttagtgagagtaacggtcatgcgctctttatcattgatagagaatgaatagcagtaaccggatccgatgtcgccgtaaaggttaaggtctttcaatttcccttgctcatgcaagcgtttcatatgaactgcacatgcatgattaatagtcatttcttcatccctagcccagtcatcaataccagaggtataacgaatattgaagtagttagtcagttcatttgatacgctcattagaaacctcacttttataaaattctttaccagacccattacagctactgcatttgggggaacggttgttatcataccgccccgaaccgttacatgcaacacatttccttaatttccagccatacacgaacctcatgtaataatcggttcgtgcggccttgcgttcatggaaattcattcgatttctaccgagtaaccttctttacgtttttggtcagcgaaatttcttgcgcctccccaatcgtaacaggttctacgaccaacttctgaatcattatgaaaccaaatcacggtatatcgctttcccataataacctcttaaactttgttgtaaacctgaaccaaccacatttcgatgttaggcgcgtaagtaacgtttaccttatgcattgtgcggtatttgtaagcggctttgtatgcatcgagttcagtcggaacacagaaagagaaaccgttgtcatagcgttctgcgttagaaacttcacaaccaactacagcggcaatatttttgttcatgttcatgatgttttcctttctctgtttcgtttcgatgtgtgtaatataacaaagcccctgcactaatgcaagggctttttgattattttggtaatttttcgattgttgctttcaactcattgattttattaaagagttcatcgctatatttcatcaactcactacggcgtttttcggcccacttgatcaggaattcaggagaatctacaccatacgtgtaaccttctgcactcagttgaatacgagcacgggaaccataatcaacagaactttgttcaatgagaaacttaaccgcatcaagcagggctaaatcttcatgacttaccatgattccttctgcctttggaagatccacaacttcatcctgaatgagttcacggcgggttgtttcttccagtgtttcatgattctggatcatcgtttcgaccggatcctttgccacggctggtttgttttcacctacttcttccaaaaacatcaacatccatccaggaattttagtccggaaagaactttgtacttcactggtgcatgaatttcccagaatgtggatcgcgttaccatgcatatcagctttattgatatagataacgttctgctgttcctgtcggttgctaccataagaaaggaagcggcgtaacgatgtgttatgaccatacttccctaaatcgatttcagccaggcaatcaatgatcccacggttagaaaccttgtaacgcttaccctgtttgaaaaataacgattcttccaggtgagtaggggtaaactcttcataaagaacatagaattctttaggaattttgcgctgaaccagactcagtttacaattattagaaggaacaataacagagtgaatgtttccttcggtatcacacatagcttgcattacttgcggatagtaaagatggtctttcttgcaagtatagctatggatacgactctgacgttttttgaagtaccatttaccagtttcaaaaggcgctgttgtaaaattcattttgcattctcatacatagttaaaattgcttgcatatgttccggtgattgtggaacccctgcaaagttcactttcaaaaagaaattcaaccgatcttttatgttgcactcatcgagtccaagcgctggcaatgaaatgttttcaaaagcacgttgttcatgtctttccatttcaccccaaaacaaacgggaaccgttaggcatcggtattccaatttcattgttccagaatttcatgatagttgtcaagcgttgttttccatcaatgacttctacccatcgagattcgttgaattcactatcaaccgcgatcgcaatgataccgcaaggaaacccagtaatcaaagtcttcatgaaagcatcttgctctttctgcttccacacgtagggccgctgataggacggattcagatccagatcgttgttcttgaaccaatgaatgtaactaccaaccatgatcgcatgatcgcgactttggaaagtttttaactcacgaatacggtttcttacaatttcatccgacattataaaatcaccatccagtatataatcgtaatcataaccgctacggtgaaacatattgcagcgtacacccgcgcattatgaacctgtgttttcaattctgcgatctcttgatccttttcgctttcaaactcttcgcgagtaccataatacccaggatcgttagcagttgccaatctaaccgcatctttttcaaccagcgttgcgtaaccgctttttatttgtgtcgccccgtaccatccaccccgatcgttgttaatgatcagatgatcgcctttttcgttatgctttgattcgccaacaacaataacccgcttaccattcataatatgatcctcaaaggggccgaagcccctatttcgcgttcttctgtagataatctaacagatttccgctttgatgtaaatccaaaactttagaaaacttctctgcgtttctttcgtttgtgaattcgtcgaaatgccatacaccatcatcagctattaacgcgccaggtgatgaacctgtttctacatcacgggaaagcgcaagccccagagggtgtaagatttcgcggttaatgcgccaaacaaggcccatttcagatagagtattaaaatcgacgtatttcatattatgcctttggtttcacaccgtaggccaacataccgaaacgatgatcattatctgcatctttaaacagaacttcgttaccatcaatgcagatgacctttgcttccggatcgatgtatggaagcaaccacaaagggatcaggcgtaggccgctatgttcatcccagcgactgaaattaagttcttccagttcatcaagggaaaactcattaggatcgatataacggaaccatttggtatttttgaggcggtcagggaagtttacaatttcttcatagccgaattcagcactccatgaagagtaaacagtgacttcggatgctttggttaaaacagcatcgcgaattgatttgcatatatcgattaaagtcagttgattttccatgatatatttctcatcttgctaaaattttaggcagtagttgccccatcgttttacgtgcatgtgacggaatctgtgagatcgggacatatttaaaatcatccatttcacgtatagtccgtccgttcttaacgaaagttgatgcacaatagcattcttccgctactgggtaatcttgccctacatagaggaataaagcaaggttttttgttttcgtgtaatcgagaacacccaggctaaccaattcctccgcgaacacttcaaatcctgtttcttcgaagcattcgcggatcgccgcgtcaatatgagtttcgcccttttcaacatgccccttcggaatatcccaatggggcgtttcagtggcatggcccatcaacacggcaccatctttaacaaagataatacccgctgatagttccatttattcacccgcaaaagcgttatcaaatgcttcaagtgcgttgttagcgcgagcactggcttttgtcacaccagcctggagattttcaaagaaggtatgtttccacacttcgcggcgactggattcatgttccagactgtttttgtgatcaccgcgaatctgttcttccatgtcataacggtacagatcgagttctgcgtttaatttctgttctaatgcctgtgcaaatacatgttcaatattcattttgtatagcctatttcagatttaaggttttcgagggtggagtgataaacaacattcccttcgtgtcgagtataccatacttttccgttctggttacactcattcattacattttcatctaaaccagggatcggcttcatgctgggagaaaacgcgatagacatcatttgttccgcactatcagcaaacccacaagggaaaacagatccagttggtttatcaagatacatcaactctactttagccatagatttcttcgaaatcctcacaatcaggcaaatacgtttcacagaaggtgcaaagcgtaaagaatgcaggttgacgaataccaggattatccggtagatacatccagaaggtgttagcaaacacgatgaatgttttcaggttttcggtggtaatttcgctaacaccatcatacccggattgattgatcgcgcgttgcagtggcacctcgtactgttcgcaatagtcggcataatgatcgcttgttacaaggccattagccattttaatcaaatcgacgattttcatgattttacatattccactttaacaggttttgcaacaaatttatctttggtgcgcccatgaccattacacaggtcacattctttgttgaaatctttcatatcttcgacccatccagaatctggcaacccagacggatatgcgttataacgaatggtttcataaccttttccgttgcatttcgggcaaacatgaggacgttcttttttagcagactctgccagttcgcgaagggtggtagaactaccataagcccgacacatgttttcaaagtcttttaaagtcattctataaacatcaatgacgttatattttttgccggatggtttagccataatatatttctcacttaaagaattttttgatgaaagagatagcaaggccgataccaaagaaaattaagtaaccttttccgtcaccgtgcgccaaaacatagagtgagctgccgtatgcgatgagttctgcgatgttcattaagtttctcatgatatcctcctttttctatattaagtatcttaccataatataaaccaaagtcaacaacaaagttttatcaacccacttatcaccagtcattagtaatcccctacaggttgagacgccgcaacactcaggatcttgaaagtgcaattgttccattcacaataagtttttgcgcaatgaacacttcctttcataacaaacccgtttgagaaaattaaccagtaaagtttcatgatagcctcctttgtttcgacaaggccaatataacaaagcccctgcacgaatgcaagggcttttttcagtttttcaacatccaaagttgcggaggacaatctttagaagcgattagacgatccaggcgggacataacccgacgataaccgtcgtattcaaaattaatttttggtggaacgtagttgacctggattgtttttctgttagctaaagaaacatactcagggatcaccgttcgcaaccgtatagcgatcactggcttctcttcgccttcgttaaagaacatttgaacagttataggacaagcaaagattttaccatttacccgacgataaacaataacttcctgtgtcccttctgttttggccttcaccgcgtaggttagaacataacacgaataatgatttgctagactcatcatgatatcgcgataagtttcaatatcttttttaatcgatactgaacggtctttaaagcgatctgcaatgtggtcagcagtagccgctaccttgattgtataccagtcacctaacgcgctagtaaacgcctcgctaacttcttttcgtacactgttaacaagatacattaaacgtgttctgttcatataatcctcactgatttttgaagtattcgatctgacgcaaacgcttttcagcggcggctttcgaatcgtattcaccaagttcttttgtgcgatcgtgattcaaaacaacccacttatcgccacgctgttcaatgtgttctgtaatatcttttaacgacttatccagatccagtgattcagcctcttcacagataatagtcaaatccacgggcagtgtcaacaacctttttactccgctgatatcatcaagcatcgaatcgtatgcaagggttacgtgcggtttgtaatccggataatcgtatgttgcgccagcatcaatagaatctttgaaacggctatgcaggtattcagattccaggatccctacgatagtgctaccgtattttgtgtcccacttttcaacatcaaccagtttagcaggttctgtgatgtcctgttgcgggaacaaatcaaccgttttccggctgtatacgatcgttgtatgcatcttttcggctgaaacagcattctttgtgatacctaatgtcttttgaacatttttcaaagcctcacatgaagcctgatcgaatttagcacacatgtagataccaggatctacaacaggttttgtgatttcaagaaatgatttcataaaacaccccaataaaaaaggggccgaagcccctttgtaataaatttgtttttacgcttcttcgccaaaggcggcttcatcttccgcgcctttttcgacttcaacggaagggatcagagcggataccgcgccaatcactgcttctggggttactggctggcttgcgtcaatacccagtaccgaacacaggtcggacagaagttgacgatgaacagagagttcactttctttttgcgcgattacttcgttcagatcgaatgcgcggcctttcagtaccagtacttcattttgcagtttttgaatatcagacattttattacccattgttaaaatttaaaagtatcgagcactttgctctttagttgtttcaaagtaccttcgttagtgatgatactatctcccggttgaggtgtcaaacctttttccgtggaatgttcatcaacaattccggtatcttttacaataaacacaaacttagcacccaagcgtttcaggtatttatattcgtgttcctgacgacagtcagttaccagaagatgattgtattcgtcaccagcatatttattgacgaatctttccaatgtgtaacgaacccaaaccgtgttatcatacttgcatacgatatcagttccaaacacttgcatcaagcgtctgatactccagggagtatcgttactcataatcagattatcaatatcatcaggactataaacaatattgtatccacgttctttgaggatttcaagcccgattttgaaaatatttagaacatcttcattagacatcacaagaggtttctctcgatcaccttcgtaaaaaatagcatccggatcagaatattttccttcaaccagactacgaatgtatggtttatcgtaaccatatcgctgcattgctactcttagcgttcttttgataccaaatgccagtgcttcacactgaacatcattgtacgcctcttgaataaatttagcaaccgtatctttaccagttcgcttttttccactaatcacataaatcattagctcattctcttttgagaagtgactacttttccgtcaatttcaacttccatatgaaggaagccaaaagttgccatacacgtaaccgcttcatcactatcgttagtataacccaattcaacctcacccaagtttgttgggaaggcaccataaaatctaaatgtggcgatcgttttcatctgggagttatccaggatatgcacagcgaatgattgcttaggatcatcccacgcaacagagttaaactcgttgtaatcgtttgtgctcaacatccatatgtaaatcccaagatacgatctcatttcctcatcgactacaaagcggatcatcaaaggatcaaactcaaaagccgaaccaggtactttacctcgaaccatcatatttgcaggaatatcaactgctgggaggttcattgatggtagtgtaaccccttgaacttgtaaagtcaaacctttcatgtaactgttatcaggaatatcaacccgaaagtttgtaggtgagatttggtttaaaatcatttctgtagacataggatctcctttcctctatttagcggggaacgggatcaaagcggcctgacggggtaatataaaaatttgaagaaaatgcttgaccttttaaaatctttgatctataataattattaattaaaattttatcaaaaagatctaacaagatcaagtaaaatttaataaataatttatcaaaaatttttagatctgatcttgaattcataaattttatgatctataatatattaatattttattttatcataaatttttatgaagatcaatacttagatctaataaattttatgctttttctgaaaacttttcctttaccccgtcactaaatactggtactatgttcccatattggaaatcaggaaaaacaaaatgactcacttgaaaaaattcaaagaatttctgaccgaaggtaaaaccctcgctcgtaccgtagcacgtggtcaacgcgctaaaacttccgataaacattcaatcggttttcttcacttcaaacatggttctgatttcgaagttttagcaccggattctcacgatctggcatacttcggtaaaaacattgtacgtttgaaaggtatgactactggtaaagttcaagcggcttatgtcgattgggctaaaggtactgtttctttctacagtggcaatccggatgatgatctggatttcgacaaaccagaaaaattcaaagctgctactctgtatgaagaggcggaagaaaatctggatctgtataaccagttagcagaagatttcgaaatcgagatccctatggatgaagctctggtgaaaggtaaagtttacaaactcccaagcaacgatatgcgtcttctgtacactgggcgttctaaaactaaagcaagcggtgaatatgcagtgtttaccgtagttgatgcttccggcaaacctcgcctagtatctggtaaaaaattcacccaagaatataaaggcgatatggtttctaaactggttctggctgaatccgaagatctgaatgaagcggctaaaggcattcgcgaaaaagttattgctgtgatggtgaaacgcgggtttaacgaaaaagatgcagaaaagatggttgacaaaaacctgaaagatgctatgaaagttagacctggtgcgacccctggcaaacttgcagaaatagttagcaccctgtaaaaataaagccccttcctttcggttggggctttttgattagtatttgctccagactttttttgcgccgtaaggtttccctttggacataaattgctgagtcggtagccaaacagctttcgcccaatctttaggggcaatctctgctaatggtgatttgaggtgtgatggtagatatgctttgatcatttctgttgcgcctcgcatacctttcacgttaccccagttaattttaagcacggtcttgttagagaggcgtttagtggatccgtaccctcgcttcaataactcttctaaaaactcctgtcgtgctctgggtggcgcatagtgcaagttcaaaccatagaacactaagttacccgctttcgatcttccggatcctaagaaaatgatcagtggaaatctatcccaatacggcagggtgtctttatattttgcatcatatgcaaacgtgtacaggcgacccgttgctggttttgccacacggtgtgttttgatactggttttgatgaaattaccaaaccattctgttgaatctttctgtcgctttgccgccgatacaccaacagtgatctttttcagactattacggaaatcgttgatgatctcgatcccgtgttttttacggtagtcattacgttttttacgggcttctgtctctgcggaacgtcgttcaatctcatcatcaatctgttttttgtaacgatgcattgactttgtgaacgttgcgtagtttaatccctcagaatcggcaaaacgtttagcagaaacacctttcgtttttgccttacggaatttgatccccagttcaacccaatcactcaatttgcgtttgggtggtgctttgggtttatcctcttccgcgatgatctcaaactcaaaaataaaactcatgtttccctccagggattactgacctcgccacccaaaaacttttttgagtgattcttctgttacgattttgaactgccagcctttttgacggcatagctcatttgcggctttccacttatcaatattaactgtataggtgtaaagagcatcaataaatttctttttattgtgtacgttgttgtttactggcttcggtggaggcatggtttctttaaggggcttaacctcccaaagatatgtagtaccattttccatttccacatagaaatccatgtaatagcgtcttctcttaccgtctgcattgcagaaatacgggatcactatacattcagaattccaacgttttacgtgtgggtttttatccagccacttcataacgtagcgctcccacgatgacctatacgtaatctttcgcggatcgcctttatacttctgtatgttttcgggtacaaacgaccctttatacgtctgtcttccagccattgcgtaaatcctaaatagaataatataacgtttagataggggaacttatcgtgctattttcatacttcccgcctgttgattacaaaggcacccagacaactgatattttccgagactatcgattttattttaatcgtgtgattggaaaatataaaacccgtagttaccagataacaggcacactacgacctgaacaacttgcagaatcattatatggaaaccagcaatactactggatcctgttgatgcttaactctgtttatgaccctttctatggttggatctccgatcaggaagccgcgtatcagtgcgctatacagcgttattctgaggttggcggtgaacaggttctgtatcatgtagatgaaaacaacaacaagtattataaccttgtcgaagaccccaataaccctggtcattggtatgacaaaggtgacaaaccaatgctgtatttacagtatcaaggtgtattagctcctgtagatatttatgaagatgcagtgttgcaaaatgaagcaaaacgaacaataaaaatcattagtccgtctgacatccaggcgtttctgaatgattttattaaagaaatggaaaaggctaactcatgaaattaggcggaaatttacactcccctttctttgatggggtggttgaaaacgttgatgatccgcgcgggttgggccgtgttcaagtccgtgtatttggacaacacccagcccaaaaacaaaaatccgatgcaatcggtgttcctgttgaagatttaccctggatgatgcctattcaggatattagaagcgctgcgatctctggtgtgggcttctctccaactggtatcactcgcggatcctttgttgttggttattggcgtgacaaatggcaccaagatggtatgataattggtactgtcgctggtgaatatgtcgaacaaccagacacacagaaaggtttttgcgatcctatgggtgaataccctcgctatgttggtaacgatgttaactcccttgctttaggtggtttgaaaggcaaaggatcatcaagtgtcatcattcgtgattcaaacacaagcatagcagtaaacccagacgatcgcccactggatgagataccagaagataaccgccctgatacgggtggatttacgatcgaaaagatgctcaagcaggatgaggggatccgtacacgatggtatacagacagtgaaggatatccgacaatcgggatcgggcatttgcttatccgcgaaaagactcgcgacactgcaaaaattaacgctgcgatcagtaaagcggtaggtcgagaagtaacaaacggaacaatcacggcagaagaggtatcaaccttatttgctcaagatttagccaaagtaagatctgatattcagagaaccgctaacgtccgtgaagtgtatgtgaacctcaaccgtcctcgtcaaatggcgatcgaaaacatgtcgtttcaaatgggcgtcggtggtgttgctaaattcaccaataccctgaaagcgatgaaaaatgaagattggcaagcggcttataatggtcttcgaaattcactgtgggctagtcaaactccaggccgttcttctcgcgtgtctaaaatcgtcctcacgggcaaccttgaatcatatggggtacaagtaccagatccggaagggcgctctctgagtgctgcttacgctgcgtataacggtgctacattgttggctgctagtccggaagatccgtttactcctggtgatacccgtgtgatgtttgaagaaccagcatcatcttataatgcggaatatccgtataacatggtgtttgaatcgagatccggacacattcaggaattcgatgataccccaggatacgaacgatataaccgtgttcacccagcagggagttacgaagaaattcgcccggatggaacccgcgttgttaaaatcgtaggggatgactatcagatcgtgatgcagggccggaaactcaacgttaaaggcaacttgcaggtagttattgaaggtgatgcgttcatttacaacatgggtaacgttcaacaaacggttgatggtaacgtaactgagtttgttcgtggcaacgttcaacaaacggttgaaggtgagtacgttggcctgattaaaggcaatgctgaactaactgtaaacaaagatgcaacagttaacgttgatcagaatcttaccgcaaatgtgaaacagaatgcaaccgtggctgtaacagaagacgcaacggtcactgcaaaaaatgcgaaaattgagattgaagaaacgatggatattggtgctaaagatatcaatatcaaagcaacgaataacacgtttattgattctggcgcattaacaaaaatcactggcggcaccgtccaagtggggtaattaaatgattatggattatgaatcaataattgatggaattatgcaaaattatcaacatccttgtgatgctgagatccccgctggctattatcggcgggttatctggcaagggcatacagaaaattatccggctgttggggttgagtgggataccgagataatcaaaatcggtactcatctttatactcaagaaccgttcggacatagaagcacggatctacctgttgtcaattcaccgggaacagatccaaataccggacaaccaacagggatccttgttccgaagattggctattatttcaacactcaagcagagattgatgcttacattacatccatcggtgcaactaaaatcaatggtggtaatgattggtacggcgcggatctgtcaaaatcaaacctatacaaaaaccctggcgaactggctatgtataaggttgaaaacagtggcgggtatctttccggaacaaaccctgtatgtgatgctcgcatacgtcaggcgtataatcaggacactggcgcattcaccaatattgattattattggaatggtaatcgtatagcatatatgaagcatgacgaaacaggggcgcaccagtgcaaatatacgggtatgcaggttaacaccaacgcagatacaagcattcctcctgatcctcctgcaatgccttccacttatggagcattaccgagtgaattaagccgtgctgatatttcgtgcattccggcaactgttggtttcgcatatacaaatatcagtgatgctatgttacaggcatggaacgaaacccgtaatacgttcaagctacagtttaacatgttaacgggtgctgtacagaatggattcgggatcgcgacgatgtttgatggtttatccgtatcgatggaagaagtaatggcgggggcgctcgcattgtcacagcaagcatggcaaactgctatgaaagttttcagacaagtgattagcgctgcatttaacattatcggtggtgcatggggattgattaatcagttcttgcctcaagtaaccatcttaggtgttgcgatcaacatttacgatctggtgtttggtgataattctgttcagactttgaaagatgcgtttaatgcaatcatcaaatccggacaacaaacatatgaaaccgtcataaacgcaatatacggggccataggaagcgcatacaattactctgtggaatatgtcaaagctggcgctcgcgaccttgtggatgcgtgtagcgcgttatttgattggtgtttaacgatgttccaaaacggttgtgttgcattaatcgacttatacggtcggatcatgcaaacatgggctatccctccggaagtcccaaacccgttatggtctgcggtgctggctatccgtaacatcatgatgcaaatcaaaccacttgatataattctgggcggtaacttccctggattcactgcaatggatttgtatcaacaagcacaggaaaaagtcaaggcttttgttgatgagtcatacgaacagatccgagggctttatgaacaggggcaggaactttacaaaacgttaaaaaatcagattttcgaacgtgatacaattcagagaaaattcaaccagtacttaaactggatgtggggcgctgtaacagacgaagcaacagcggcttatcaatctgcattggatgctgcaaacgctgctgtagctgcaacacaggccgcgtatgacgctatacaggaacagattggatctctacaagatgcaatgaaagatacatacagcatggcgatggaagaattaaagaaattgcctttgatgagtacaataaacgagtttttaggcttctgtggtgtcgcatttgacgatcttctcaagtcatatgaaaatgcgattactggtgctcagtctctgtacaaaaatttcattgatagttctcgctcgtttaaagatcactgcaaagtaatctataaccaaatttgtacgttggcgttgagtaaagtcacacaatatgtgaataaattgctgtctctcataggattagcaatcaactttggttcgattagtgtatgtgttccagtactgaaatactaaatagtcgaatgatcaagaggaatttataataatggctactgctaagactaagactgtcaaaaaacagattaaccaaatccccgatatttttatcgggggtactttcgaagaaattaaaacagatctgattgattggctgggtggacaagaagagtttaaggattacgatttttccggctcgcgaatgaacgtactgatcgaccttctgtcgtatgctactctttatattcagcagatgggtaacacggctctatttgaatcgtttattcgcacggctgcattgcgtagttctgttgtacagtctgctcaagatctgggatatatgccagattctcgcacggctgcaagcacagcagtaatgattacggctgctaacccactgaccccaacatcgatccgtatcccgcgcggtacaaaattcatcggtactgtaaagaatacagacagttattcttttgttgtatcagatgacgttgttatcgttcgtgatagtaataacaactatacatcaatgctgaacctggtgcaaggccgtttagttcgtactgaactaatttatgacggttcgagtatcctgatccgagatccaaacattgaccgtagtcaggtacgtttaactgtaaacggcgcacaatgggaagactggacaaacgaaagcattgtaaacgcaacaggcgcaagcacgatttactacatgcgtgaaactgttgatggacataccgaagtttatttcggtgaaggtgaagcaagtcaacaagtggcgggtggtgcattaaccgctgaatatatcgggggcttgaaacctgctaatggatcgactatcgttattgaatacctgtcaaccgatggggaagcggctaacggtgcaaaagattttatctatgtcgatacattaaccaatattagcatcactaacatcgaagaaaacccgactaaatcccctgattatgtcggtgctgatggtggtggtgatccagaagatatcgagcgtattcgagaactggcccctgttatgcgtgaaacacaacgccgttgtgtaactgcatcggattatgaatctttcctgtctcacagatttggttctatcatccaggcggtacagtgctttactgataacgaaaaacctggttatgctttcatttctgttaaaccaaagtcaggtttgcgcctaacatcggtacagaaagaagatatgcaaacgtatctttcgaaatataacctcgcgacgatcaccccatcgattatggatcctaactatctgtatattgtgcaatctgtcaaagtaacgtatgatatcagtaagttgacggaatcagaggaatggttacgcggtcaggttatttcgtcgatcgactcttactatactgacaacgttgaaattttcaacaaatcgttcagtgtatctaagatgttgacttatgtcgatcagtctgatacttctattatcggttcggaagcagatattaaattgctccgtgaaattgacaactattacagtgctcctatgtctgggatccatttcttgaaccaggtggaatcgaaatcaatcatttccagtacgttcaagttcaccaacgaagaagacgaaagttatgttgttcgttatgcttctacggaaatggatcaggatggtaacgcaaaaattgtaataggcccgttcaaggatggggatatttcgatcgctgcttatacaggtgatgactttgaaaaattaacagatgcaggaacccgtaataaatattacgaagtcggatcggtgtctcattataccgatttcattagctttgatctgggcgttctgaacgtatccgccgatagtttcagtgctgcttatatcgagctaaccgcaaagcctctcgaagaaaccatttttactcgcgatggatcgttgatcgtgtttgaaaatgacctacgtcctcaatacaccacattgactatgaatcctatcagtcaataatcgttaacccctgtcttcggataggggtttttctttttataaatacgtgatatacataaccgcaaatttggagaaatataatgattaaagcgccttcgattacgagtttgcgcgttgataagctggctgctaacttcgtttaccttaaatgggatgatgttggcatggatttctattatgtggttgaattggcccgtagccgtgatatggacggaactattattccagacgaagagttaatctggacgcagttgggttatagctacgaaaacgaatggtttagcgatcaggttgccccaaatacacgttataaattccgtattcaaacaactcatgaagggtttgaaccttctgattgggtgatcagcgatgaattatggacgtttgatgagaacgcctacgcatatacaaccatgcgtgaattcacccctgctgattcgtttatcaatgaaaaattcgccaaaaacaatcgtgattacgtcgattttaacgatgatgttattatggcttctctgatggttgaggattttgtatactctcccctgtattctgatgtaagccagatcagcgataagatcctgaaacaagaaagctaccatgaaattcaagatcacatcgaacacgtttgtaatgatatagatcgcacgttcctggtatactcaaacggattgctttacctgtttgaacgttttcagaatatggctaaagtgtcaaatgacaaaggccaaacgtggtattactacaaagcattaaacgatcgtgtaggcaatccggtttcccgtaccgttgcttatcagagcgctaacactacgtatgtgttaggatacgatcgcatattttacgggcgcacttcaacagatattcgttggtcttctgatgaagttcgtttttcttctgatgatgtaacgtttgcgaagctggggaaccagtcagggttagattttgatgttgattcatacaacacatatgcgcgtctaccgggaggagtgtcgaagtatgccgaagctatagcttgttctaatgaatggctctacgtggctgctaagaacgttatgcgccgtattgcgttacgtaacacaccaattgatactgatcctggttcgccgacctttggtgaacgtatttttgatgaagtttcatataccatcgtaccaggaaatgataaaattgttgttaaaaaaatggacgtgctgaatgaccgtctatacgttctggtaactggtgaagttaaaacggcgatgatggatccgactgtcaaggctaacgtgatcccatcaaacgatgctggcgtttatctgtgggatgagaatgcaaagacgtttacccgtgtttatggtaaaaccgaagatgaacgtttttatatcactcatgaatataccaatatgtcaaccaatggcgatgaagtttacatttctgttggtaactacaaatatccaggcactttgccagatctggatctggttgaaaagtatccggaagatgtgcattcagcggtgaaatacgatcttgttcctggttatactgcgagcatttcgattaactttgctacagttcgtgcaaatcagaacgatcctacagtatggaactttgggccgcaagagtactacaatgaagcaaactttagctggcatttccgcgataaggttagcacatggatcaccaatgataaccgtcctctggtggtttatccggaaaccctgtatactctggttactgatagcgcgtctcctgcgtcaacgattcgtgtaaaccatgaagtttgggacaaaggaacagttactatctacttgaataatatcaagtttactggttttacgaagtacacaaacggtgttctgttgtatcgctcaggtggtaggataattggattctatgaactgtcataccgcgcaagggatgaactcactattttctggaaacccgataacactttaatggtggcaagtctggttaatcaggaacgcgaaaacccatatacgccggatattgaacctggattaatcgaccctgatctgagtcacatgatcactcgttttgctccgcaaagctatctggacaaccaacagttcgagaaatttggtgaatactatctgcaatacatttcgttgggaagcaacagttactataacaaattgctgaacctcatccggaacaagtatccgagagagaaaaacaacgtcgaatatttgtggtctgaaattaaccgccgtaacatttacctggataaaaccaaacgtgaggcagtagttagatttttcgaatcacgtgcaagcgatttctattcaacaaaagggattgaggcaagttatacgttcctgtttaaattgctgtataacgaagatgtttccgttgagatcgaaagctccaacagtctcgaatatgatattttggttagttcaacaaatatcagccaggatatcgtaggccggacgatctatacaccaactggacgcgctaacgttacatacatcgaacgtgactatgaaaatggtcaattgcgttggtcaatgactctgcataatgctcaaggtaactttatcgaagggcaggttgtcaagtcagaaaaaaccaatttcaccggaatggtaattcgtggtgttcgcggtaaacaaatggctaacaactcgatcgactatatcaaccgtggacgatcttactatgtgatgaaaattcgttcaaatctaccgacttcccgttataaggatgacgtattgaggtttgttcatccggtaggattcggctttatgggtattacgatgttaacagtattcatcaactctggtttgtcaatgactcataacgagacaatcattgatattctgagaaactaccgcttcgatagtggttatcctaagttctggcctgatcgcattgcgagtatggacggtaacggaaaccaacaattcgacctggttactggtgaacctctgtacaccgtacacccgcgagcgggggaaccttttgatgtacctccggaatatgacattgaagaaaaaccgcttaacggtgttcttccttctgcgcgacggttcgatcaaagtccgttgttcgattgctcaggcgttaaatattcacagttccgtaatttggtggataaacgactgaaagatgatgcaggaaacccacgtgatccaaatcctccatcacagattaaggtaggaaattaaatggcacaacaaaacttgtatcggtcggtaattactgcaaaattccgaaccgaaaacttgatgaacttcaaagatatgatcggcgatgccgccgatctaaacacgatttacatgtctattggacgaactgaatcgtggtcggataacgaatccgaccctaacttcgccccgccatatccaaatgatagcaccgatggtgttagtgatatgtggacgcatatgatcggggctactaaagttcctggtgatatgatagatgcaattttaccacgtaaagactggggtgatactcgttatccaaacccgaaaatcttttactttaacgatattgttgttgtaaacaccgcaccttataaccgtactgatccgggtaaaggttggatggtttatcgtgtggttgatgttcctgatatcggttcttgctccatttcgagcattaccggaaaacttgaatgtatcaggatcggcggtatctggagtccgtctcatgaatctagtgaacctccacgcggagaagctaacgggatcgacatgggagacggttataaatgggaatacctctacacaatcccgccagatgtcgtgatcaaccgctgtacaaatgaacatatcgtagttcctttccctggcgaactggaagaggatccggtacgttggggttatgataacgtgattcaatggtatccaggacaatacgatctagtgtatcggttgaaggtgaattcaatgcgttttcgtgcatacatggattctcttttcttcccgcaatctacgcttcctggtaacaaagggttccgtcagataagtattattgtaaacccgttgattaaaaaggcaagcccgaccgagcctgaaaagaaagcaactggtgattactataatgctaacgcgcttgaacctgattccggacgtatgatttacatggaaaacagacaacctattattcgctcccttgatcagactgaggaagtgagtattgtattcgaattctaaggaaaaacaatggcttaccaaacagcaaaaaaactaattgatgtcggtgaaatcggcaacccatcaacaggcgacccgctttatgatggtggtgttaaactgaacgaaatgatcaccaacgtttataatgcgtttggtgatgtgcgtatgctgtctgcaaacgaaggtgtcggtaacatggtgatccatgctaccggatactatcagaaactaccacgcacttactattcaagcacaccgatcgaactgggttccctgcatgacatagatacttcaacaggttcgattaccgttgttcttccttctggtaaggttggcgaaggttgctacttcataaatagtacgggtagtgtctctgttgatcgtcctatcgcgtttcgtcctcaagttggggatactatcgcgggggttgcagaccagttgtatatcacgtcaccttacacctttgtaaaaatctggtgtaccaaaaaagaaggtgcggtaacaaaatgggattattctgtagaatctatgttcggttctaaaacgatgcctgttgacactacggcgcttgtactgaaagcaaacccgactgctattcctatgttcggatatagcgaatttagcggggctaaggtgcttgtatacgcagaaaacttagctggtacagttaccaaaatggcagaagttttaatgaccgtggatcgtgtacacaaaacgatttattcaacggaatacgctattttgaaaaacagtgaagatgaaatgtttacattaaactttactgtcggtgctggtgatgttgtatacgctaacgtgcaagcgatcaaagaagatcgaattaaattcacgattaaagcaatagatacgattaaatcagggatcgcgtcatgaaacaagaaattttaataggtcagattgtagacgatggtacaggcgattacctgcgtcgaggtggtcaaaagactaacagcaactttacagaattgtataacatgctgggggatggtgagatcccccatccagcaggtgcctggaaaacttttgcgggtacgacgctatcaccaaaatttggtgaatcatgggcgttgaataccagtgcaaacaaaatcaccgtaaacctcccgaaaggcggcgtaggcgattataacaaggttattcgtctgcgtgatgtgtggtcgcgttgggctaccaacaacgttagactgatccccgcaactggtgatactatcaaaggttccccaactcctaaagatctgtttaaagattttatggatgtggaactggtgtattgttctccgggccgttgggaatacgtcgaaaacaaacagattgacaaaatcacaacttcggatctggcaacagtagcaaaagaaacgtatattgctactcagggacaaactgacttccctaacgtattcggtgttggtaatgaatacaacctgcaatcgttcgaagtttactatcgcggtaacttgctgttcatcgatgagaaagacggattcaatgctgataactcagactatggatcgattggttctgctcctggtgaactggttgcacttgatggtaattcagtacgtcttaaaaacccgtgtaacgctggtgacacgcttcaatttgttacctatctagatgggttagcaacatggcgttcgagctatgaagcgtatgtgatgcgcatgtatcagactggtgatacttctctggaaaccgttcctggtgaacagtgggtaggtgatctggcaaccaaaaaagagtttacacctgctgaatttggtgttaaccctcgcgtgttgattaaccctaactcgtttgaactgcttctcaacggtaaacaactggttaaaggcggtgacgctgactatccggcgttttcctgtgaaggtgcggaaggtgttgatgaaagtacgtgtgttggtaactctggtgtatgggttccgtcaggacaggattatagtttagtattcactgattctgtagtgacttcaatcaagtttgctcaggaactggaatccggcgacgttgtaacgatccgttggtttaacaatgatattggtactctgatggattgggaaggaactggcggtattaaagaaaaagctgataaggtttatctcaataacgaagaagaagttatattgacgaaccgtatcgaatataccgattataataacccttctcagaaaacaatgcgtaatacaggggaaacctatcagggacgtattctggatattcaggctatgtttgatattatccacccgatcggaaccatctatgaaaacgcacacaacccggcaaaccctgctgattatatgggatttggtggttggaaacgttacgcagaaggttatttcctggctggctggacatcaaatgcagcggatcctgatttcgcattaaacaataatgatttagatagtggtggtcaaccgagtcatacggcaggtggtacaggcggtgatcgtggtacagaaatcaaaatcatcaacgttcctgaacttgtatcaaaagataaagttctgattgctgatgaaaatggtgctgtgatcattggtggttgtcagttagatcctgatgcttctggccctggatacactaaataccgtgaggatacattgaaagtgaatcatggtaacacattacctgataaaatcaaaactattccaccgtatatgactgcacatcgctggataagggttgcataatggcttacaacaatatttcaaaaacaagggagggcgctcgcgtcctctctaaagaagcagattacttacagtatgatacttatggtaagttgcctctgatcggcggtaaacgttcgatcggcgaaccaaacattgaccaaacaaaacgcggtgttctgtatggaaacgtacaatccgcaattgatgacctgtatacgcttatcgagcaaatcccgattaacggcgttgttaccatgactgaggatgcccctccaatcgctgtacagcaggttgagagcgtttcttttgatggtattgtacagaacatcgattcagaccaagaacaggctgtagttcacgtgtacggctttcctttcatctttgataatgggactaacgccgcaactgtttgtgaaacggcatacaacaaatttactgaattcgttgcagcggaaaaatatttcgcagaagttaaccgtaaaggtgttgatggtacgatcctagaatgtcgatttattgatagtgttccgcacccggcaacaaatatctcagaaaacggtattcgtcaaatcggaactatcgacgtagccgcaaaaagtggctatggttcatgggttaagttgggttctggtttcttacctgatgttactccgcaagtaaccgtgtattacttcaaacgaattgcataaggataacacatgagtaacaatacaatcaaccacgtaagtgataaatccatttacgtgacatttgacccaacaggtactgattggcctgataccataaccaacgtacaagatgcgttggaaaaaataggtagttgggcgcgtactgatactgggcttcctatcgcaacaacttctgttcgtggtattgctcagatcgcaaccgaagctgatattgacgctggcacggataacactaagattgttactccgaaactgttagcatatcgtatgcagaaccctaaagcatcacaaaccgtatggggttatacgaagtattcgactgatgcggaatctacaaccgtaactaacgatgcatcgtctattactccgcgatctctgaactatgtgttcaataaccgtaaaggtacagaatcggtttggggttcttctaaaattgctaccactgcacaggcggttgctggtacagataacactgtaactatgactccgcttaaagtcaagcaagcgatcgcgtccctggttcctgttcagtcaagcgcgaccgaaagctcgcaaggtttggtacaactggcaacagttgcacaggttcaggctggtacgatccgtgaagggtatgcaatttcaccttatacgtttattcgtttaactgcaactgaaagcaacctgggcgttattcgtatcgcatcacaggcagaagcaaacgcgggtactgatgacaccaaagcgattactgcgaaaaaattaatcaatacccgtgcaactggatctcagttcggtgttgtcaaattagcaacaactgttggttatgtggcaaacactgcactttcttcaaacgctgctgtattacctagtgatcgaaatgcggtaattaacggttctctttatgagaatagcgcaatatataacaacaaatatcagacgtggacagatcttgattggcatttcccagtaggtgctattgtcatgactggttttcagactgaccacggtagtttgtatatttgtgatggtcgctcactgaataaaaataactatccgttactttttgagcgtataggttatacatttggtggtggcggtgattggtttaaccttccagattgtcgaggcgttgcagtacgtggtcatgaccgtggacgcggattaaaccctaatcgtgggtatggtacatatgaaggcgatatgttgggctggcacgaacacccattacagcttatctaccagaacggcggtaatattccgaaatggcaagcagtttatgaacttaaaagcgccgagaaaaacgatcagagtgctcgcgtgtttgattcttccataactaaagctactggtgtgggcggagaagaaacccgcatgaaaaacatcgcattaaactacgtaattcgcgtattataacagaggttattaaatgatcatcgacaaattaaacccgttgccgaagatcccgtttgttgatggcgtcccagatgacgccacgactcaaacgaagattatttggatcaaaaacggtgaaactctggacggttcgccagataaagtgtcaaacactggtagtcttaaccgaactggtgtaaacatccagcagaacgcggttcagttagaacaaaataccatcacccataatgataaaatcaacgaagtaatcgatcaggttaacttgattactgaaaacattgatgctattggtgatgagagcgtaatcaaaaaagttaaccagttggatcaggatgttcaggcattaactttatctaacacccaaacacagaacaaggtagcacagttaaccctttctgtaaatgctcagaacgatgaaattggggaatacgatccagaaaaggatcctaaacaccgcacaattcgtaatgatatcatttacattaagaaagaagttggttcatatcctggatttaacgttgatggtgatgttgacccctcttctactggtactggccttaaataccgcgtactgagtaaccaacgtgctatttctatgcaggaaactcgcataaccaaactggaagatgattgggcgctttccgaagtaggacaactgacagaagaggtaaaagaacttcgtgctgaaatgggtgattctggtcttgccacaacccgatcaatctatgcgcgaattaagatccttgaggatggttctgttgtaatgcaaaatgaacttgatgcgattaatagttatataggacgcacgtcaggttcaaccagttccattaacgatcgtgtgaacagtctggaaaactccgttagttctctggctacacaaatcaacgatccggtaactggtatcactgcacaaattgcaaccatcaatggtcaaatcggtacggtttctgttcagggtagtatccgttatgatattgcggaaaacaaacgcagattgatggatatggaaatgattctgggtgaatccggtgatgaaggattgcagggacaagttgcgatcttaactggtgacattggcgaagattcagatcctaccagtatcaaaggccgtttgagtgttgttgaaggtgaattacgcaccaacactagcgcactctgggaactgcaaggcgttgtaggtaactcttctagtggcctcgttgcaactagccagcaggttaacaaagaaatctatggcgatggtgttagttccgatcctgttactcgcgctggtttgaaaacgacaacccgcaacctgttcactcaggtaggcgataacgcagaaggtaacgaaacaggcatttatgcactgattgccgaccttaataaacgtgttgaggatttagaagcgttgaacattgcacaggcacttgcagatcgcgtaactatcgaagatctgaatgctaaactggctctgtacatcaaagaagctgacgcagatctccgttatgagagcaaaaacccgcctctgtcattcggtactaacctaactggtgatactgaatacactactggcgatccattgtctctaagcgtaactatgaatggtggtgtttctccgctgtcttaccagtggacgaaaaacggtgtaaacgttggcacaaactccaacacatttaccatcgattcgctacagccttctgattccggaacttacaaagtaacggtaactgatgcaagccataaagtcatcgtttctgatgaactggcgatcactgtcgcttaacgattaacaaggggcttcggccccttttgaggatctttatgattacgaacaacccagcacaattaaaagatgaaattctgcgccgtttaggtgctccgatcgtcaaaatcgaagtgacaaccgatcaggtttatgactgtattcaacgagcattagacctatatgcagaatatcattacaatggatctaacaaagggtatatcattcttaccctggggccggacaacccgaaaaacattttcgatctgagtaaagaacacattttcgcaattactaaagtgttgcgtactaacatgggttcccttgtatcgatggatggtactgcggtttatccgtggtttactgatttcctgatgggccttactggtggttctctgggcggtggtggttgtgcatcacgtacctacggaatgaacgcatacggcgcggatatgggctattttacccagatgatgagctatcagcggtcaatgcaagatctcctgtctccgcttccggattactggtataacgacgacacaggacagtttgcagtatacggaaccgttaaagatggtgatattgttgttatcgaagcaatgatcagatcctttgttgatgtacccagtatggtcggtaacgtctctggatacgctacagcgggttctgatggcgaagataagccaactatagcagatatatacaataacccctacaaagctgtctcaggcggcgtgaaggctggtcaaggtacaagcgttcagagttcatcctctgcgtataacaaccgttgggtgaaagattacgcaactgctcttgttaaagaggtaaacggtcaggtgctggctaagtttcagggtatgcaattgcctggtggtgttgctccggatggaacccgactgattcaggaagctatgcaagaaaaagaaaacctccgtcaagaacttctgttactgtctgatgcacttccagtgttgatgatgtaaggaggaaaaatgcactatagattgtatcttgttgtttttgaaacttctactggattaaaaatttatggggggaagcgtcattccccttatgataatccacataatgacccatatacaggatcagggacatatataaagagagctattaaaaagtatagccattcttgtattaaatgcattcgatggtctaaagaatttcccaacagagaattactagcagaagcagaagaattattagttgatgagataatggattattattccagttgtgctaatctagtacggggaggaaaaggcggagtttctttttatgatccatcaaaaaacccaaatataggttcaaaacgaagtaaagaatctagagataaaatgtctatgattgccaaaaatagaaaatatagcgaaattggccttaaaaatagacaagaagccacccgtataatgacaagaaatagaaaacaccatgatgtttctggtgataaaaatcccgctgcaagaaaagttatcgttgatggcgttgaatacccaacattgaaagaatgcggagaccactacggcataacaaaaaattctgtatttcacagaataaactctaagaaatgggagggatggaactatgcgtgattgggatgaaaacttatttgcacaactggaatctggggaaggtgtagacaataacctaaaaacagaagttactaataagtatgttaactggtacaagtataaccctactcaacagttgcatgattcactaacagccgaagcaattcaaatgaaatctccggatatgtattacgtccgtcgagaatttgttaatattgataaaattttgggcgaagaccgtgaatcgaagtttacaaaatcgtggaaaattgcagcatacatcgattcgtatgcaaactacgaaggacagagagacttttacagcaaatttggtatgatgtcaaacgatgaaatgacacttgtgatcaatcctcgtttatttgcacatcaaactgatggcgggatccctgttctgggggatttgatttatttccctatggataacagcctgtttgaaattacatggattgagtttgacccgttcttccagttcggcgatcgtcctcaacgtaaaatcaacctcgttaaatttatctatactggtgaagaattggatcctaaactgcaacgaaatgaagggattaatcttgctcccgatgctgatctggatctcgaacctattcgaaatcttgatggattggctgataccaatattgaacagtacgaagaagatcaagcctttgaagatgaaggcgatgaattcattgaatcgtttgatgttgttaacgggcgcggatcaccgttcgcacagttcccataaatataaccaggggaaaccctatacatgtaagggtataggagaaatcttatacccgctttaacccatacaggaaaaagaaaatgtttggctactggtataatagttcgctgcgaaattatattgtcttgatgggttgtcttttcaatcacgtgcaagttaaacgcattcgcggcgaacaagaaaaatttatcaaggttccgattacctacgcatcaaaagaaaaattcctggcatccatgaacaagctgaactatgcatacagtcaggaaaatgttgctaaaacggaaacaattttaccacgtatgaatctatccctcgttgatttgcagtataacgcaattcgtaaaacggggatcgcggtaaaccaaaaaatgacgcagttacgcgcacctggaaaaacagtaactcagtttaaccctgctccgtatcgtctcatgttcgaactgggagtgtatacccgttacgaagatgatgtgtttcagattatcgaacaaatactgccatacttccagccgcatttcaactgtcgtattacagaattacataaaaacgacattaaaatagaccgagatattaaaatatctctgcaatctgtttcccctgatacatcatttgaaggtgatgcaacgacacggcgacacattgaatggtctttaatgtttgaattacagggctacctatatccgcctgttaacgagattaaaggcgagatcagaacagtatacacggatttcttttccaatatgaacccgttggacaaagataattttgaatccgttgatgctcaggtggatccggttgatatgcctatacaggattacacgggagaagaatacattcaaacgtatgctaatgatatcccaattcctagcggtgatcaacctcctaaaccgaggggccaataatggaagaatttagcgtaaaacaactacttgatcttgaaaatctccctggtgctgaaactggggaagaaatggttgtatatgaaaaactcgaactcgttgatgtcgagtcacacccagcagatcgaaaacctgatttagaggaagactatgcacttgcgcgtaaaaccgcgcattacatgaatcagatgatcatggatatggcacaaattgccttgcataacgctaaaaactctgaatctccgagacacgttgaagtttttacaaccctgatgaatcagttaaacaattctaaccagggattgatgaaaattcataaagaaatgcgagaaattaccgaagaaacaacaaaaccaggatctgaaaaaggtaatggcggcggtaatgaaatgaacatagagaatgcaactgtatttgttggttcccctacggaattaatgcagaaatatggtagtgcatacgaaccaaaagaaggcttcattaatggtgaagcggtagaggtaaaccctgatggaaatggaaccgacgatcgatccgagtaaggaatcagatcacccaatcggattaatgcatcccgattatctgaaaaagaaaattgatgaatttgggatggagtggacgcaaagcgaacatgataaaaaatggtatccgacaaagtttagtgattacctaaaaattaacggtatccataaagttgatattcaagcaaaagacagttcaaactttgcgacttataaaaacaaaggaaacaagaaaactcgatataacggaaacccaaacctgaaacgcgcgtacatccaaacgaaatggacgcaacagatgttgatggagtgggttaagtgtcgtgacgatattgtttattttgctgaaacatattgcgcgatcacccatattgactatggtacaattaaggttcagttgcgtgactatcagcgcgaaatgctgatcgaaatgcataaaaaccgtatggttgcctgtaacctgtctcgccagttgggtaaaacaaccgttgttgctatcttccttgcacactttgtgtgtttcaacgaggataaatatgttggcgttttggctcataaagcctctatgtctgcggaagttctggatcgtacaaaacaggcgattgaacttctccccgatttcttgcaacctggtatcgttgaatggaacaaaggttctattgaacttgataacaaatgtaaaattggtgcgtttgcatcttctcccgatgcggtgcgtggtaactccttcgcaatgatctacattgacgaatgtgcgtttattccaaactttattgatgcgtggttagcgattcagccagtaatttcttctggtcgtaaatcgaaaatccttatcacaacgacacctaacgggcttaaccacttctatgatatctggaacgctgctatagaagggaaatccggcttcgtaccatacacggcgatctggacatcggttaaagagcgtttgtatacagacggtgatgatggcgtatttgatgacggctattcatggtcttcgaagatgatcgccagttcaagtaaagaagcatttttacaggaacattgtgctgaattcatgggaaccaacggaaccctgatcgctggctggaaattgtcaaaactctcatgggttgatactgatgaaacggaaactaatttttatcagtataaagctcctgtagagggacataaatatattgcggtactcgacccagccgaagggcgcggtcaagactatcacgcgatgcatattatagatattacatctatgccgtttgaacaggttgctgtataccattcaaacaaaacatcgcaccttattttgcctgatgtcctgttacgttatcttatgatgtacaacgaagcatgggtttatatcgagctaaatagcacaggtcactcagtggctaaatctttgttttctgagttggattacgataacgttatttgtgatagctataatgatttggggatgaaacagagtaaacgatcgaaagcgattggctgctccaccctaaaagacttgatagagaaagataaactcatcataaataacaaaaagacaatacttgaatttcgtactttctcagaaaaaggtgtttcgtgggctgcggaagaaggtttccatgacgatctcgttatggcgctggtttgctttgcatggctaacaacacaaatgaaattcgcagaattttgcgagaaagacgatttgcggttggcaaatgaggtattcgcacgtgagcgcgaactgctttatgaagatatgttatgtcctgttatcgtaacgagtggcgacgaaacaatatctgtcggccaacacggtatttcgtttatataaatttagaggaaacttaataatggctttaatctctccaggcattgaaactaaagaaacatcggtacaatctaccgttgttcgaaattcaactggtcgtgctgctattgttggtaaattttcatgggggccagcttaccagatccgtcagatttctaacgaagtcgaactggtaaattattttggctccccagacaatgacaccgctgattatttcatgaacgctgtaaactttttacagttcggtcaggatctgcgtgttgttcgtgtcgtcgataaagaagccgcaaaaaacgcaaccgcgatctataatcagatcaaaaccacgatcaccgctgctggttctaactatgcagtagacgatcaaatcaaagttaaacacaataacgttgttattgaagaagatggcgttgttaccagtgttgatgatcagggtaaaatcctgtctgtgttcattccgagcactaagatcatcgcacacgctaaacaggttggtgtgtatccggatctgtctagtggctggactacagaaatcatttccagttcttctggtgtttctgctacgattacaatcgacggcgtagaagttgatccgggtattactctgctcaaccttgacaccgcaaaagaaactattcaggcaactgatttccaggaactttgcaccaaataccagctaccgtctgttattgcaatttatcctggcgaaatgggtagcaccgtaacggttgaaattctgtctaaagctgcatacgattcttcggctgtcattaagtcttatccttctggtaagtctggtaaaaacagcggtcgtagttcgatgaactttggccctcagaatgataaccaatacgcgtttatcgttcgccgtggtggtattatccaagaaacgtttatcgtgtcaaccgctaaaggtgataaagatatctacggttcaacgatctacatggatgatttctttgcaaacggtggttctcagtatctgtatggtacgtccctaaactggcctgtcggattctccggcgttctggaactgggcggcggtacttctgcaaacgccactgtaggcgctgatgaactcatggctggttgggatatgttcgcagatcgtgaatctctgcatgttcctctgctgattgcgggtgcttgtgctggcgaaactgccgaaatttcgtctactgtacagaaacacgctgtgtctatcggtgaaacccgttcagattgcgtcgtattcgtttctccgccgcgttctgctctggttaatatcccactggctcaggccgttgataacctcgtagaatggcgtacaggctacaaaatcggtaatactaccccagttgataacaacatgaacgtaagttcaagttatgcgttcatcgacggtaactataagttccagtatgataaatacaacgatgttaaccgttggatcccgctcgcgggtgatatggctggcctctgtgtttataccgatcaggtatcgcaaccgtggatgtctccggctggctacaaccgtggtcaactgcgtaactgcatcaaactggctatcgaaccgactaacgcgcatcgcgattctatgtaccaggtacagattaacgcggttactggtttctctggtggtgctggatacattctgtacggtgataaaaccgcaacgactgttccaagcccgtttgaccgtatcaacgttcgtcgcttgttcaacatgatcaagaaagacatcggcgataacgcgaaatataaactgttcgagaataacgatgatttcactcgttcttccttccgtatggatgcaggacagtatatgtctaacgttcgcgccctgggcggtgtatacgattaccgtgtggtttgtgacactacgaacaacacgccggatgttattgatcgcaatgagtttgttgcatcaatctacgtcaaaccagcacgttctatcaactacatcacactgaacttcgtagcaacctcaactggtgcggatttcgatgagttgattggatcaacgtcagtataacatgtaaggggctgaaaagcccctataaatacacatagaggttagaaaatgcttactgatattgtacgcgcctttgaatccggtgatttcgcacgtccgaacctgttcgaagtagagatcccgtatctgggcaaaaactttaaattaaaatgtaaagccgctactatgccagcgtctaccgttgaaaaagttccggtaggttacatgaaccgcaaaattaacgttgctggtgaccgtacctatgatgactggacaatcacggtatataacgacgatgcacacacaacccgtgatgcaatcgtagcatggtcaaacatgctgcatggtatgggtgaagacattacaggggatatccctgcaaactacaaaaaaaccgctacggttaaacagaaaaaccgtaacgacgaagtaaccgccgaacataccatttatggcctgttcccgaccaacgttggtgaggttactttagactgggatagcaacaacgaagtgagcactttcgagtgtactttcgcgctagactggtgggtttaaacgctataaatacaggggtagcaataccccttatcattatttttcggagttgtaaatgaacttttttggattagacaatgtgttagggtttttcaaaaatttcgccaaacaggatgaaatggaatttgaagcccaattaaaagatgatacaggttcgattgcgcctccgaaaaataacgatggggcgcacgaaattgaaacggacttgtcaaatcagcgttattcttctgtgttccaacagttctattccggacaggatccgcgaattcagaacaaaacacagctaataaatacataccgtggtatcatgacatatccggaagtggaaaacgctgtttctgaaatcattaacgaagcgattgttaatgaacaaggaaaagatattgttacgatggatctttctaaaactacttttagtaagaatatccaagataagatcatggacgaacttgataccgtaatgaatattcacgatttcgataaccgaggctctcgtttattccgtgattggtatgttgattcgcgtatctatttccataaaatcatgcataaaaatgaatctgatggtatcaaagaattacgccagttagatcctcgttgcatggaactgatcagagaatcagttacagaaaccctacccggtggggttaaaattttccgtggctatcgggaatacttcgtatacaccgcaccaaaaaacggttatagctacaacggacagatttatagtcacaacgacaaggtaaaaattcctcgctctgcgattgtttacgctcatagcggccttgaagattgcgacaacaacattataggctacctgcaccgcgcggtcaagccagctaaccagttacgtttgctggaagatgctatggtgatttaccgtattacccgtgcgccggaacgtcgtgtgttctatatcgacgtaggtcagatgggtggccctaaagctacacagtatgtaaataacattgcgcagggcttaaaaaaccgtgttgtatatgacgcgagcactggtaaagttaagaatcagcaaaataacctgtcaatgacagaggactattggctgatgcgtcgtgatggtaaagcagttaccgaagtttcaacgcttcctggtggcactgccttctctgatatcgacgatgttaaatggtttaaccgtaagctgtatgaagcgttacgtattccgttaagccgtatgcctcgcgatgatggcggtatccagttgggtaacgatggcggtattacccgcgacgaattgaactttagcaaatttattcgcgaattgcaaattcaattcaaccctgttcttgcggatccgttaaaaactaacttgatcgcgaagaaaatcattacagaagatgaatgggatgaaaacgtaagtaagattgcttttgtatatcagcaagattcttactattccgaaatcaaagatattgagattttggaacgccgtttaaatctgatgggccaacttgaaggggtggtcggcaaatatgtatcccataaatacgtaatgaaagaagttctccggatgtctgatgaggaaattcaaagcgaagccaaacagatagaagaagaatcaaaagaagaacgttttaaaaatccagaagcggaagaggaaaacttttgatgaaagaatttatcgaagcaatcaaaagcggtaatctggtggaagctaaaaaaactttttactccatcatggaagaccgcaaagaagcgcttcgtcacgaattgcgcgttgaacttgccgaagctgtacgcatcgaaggcgaagaagacaaagaaaaagacgacgaaggcgctgataaagatgacgaaaacggcgataaaaagccagccgaggatgataaatccgaaaaagatgatgagtgaggtgtgtaatgcaacttgacatcgaaatcaccgccgaagatctccaggaacatttagacgaagcgaaagcccgtgtagatattctgggtatcgatgaaggcacggttaaaatcatcgaaaatttggcggtcaccgaaccaaatttagcccttgctatgatggcggttgttgaaggtttaacacttgatgaggtaattgtcaagcatgttgattcccgtggcaacgtagaacgcctcaaagacaggaaaacccgtgagcgtaatgcgtatcagactaccggattaaccaaatcccaacgtcgtcagatcgcgcgtcgtgctctcaaaacaaaacgtgctaacccgtcaattgctactcgcgcacaacgtaagcgcaagaaagcattgcgtaaacgtgctgcactggggctataaatatgaatgaatcccaaatcaacgaaaacggcgacatgcttttaatcgaagaatggggtttaccttgcggtgacgtttcagaatctattttagaatctgttggggaatcaaaagacggtaaattgcggatcgaaggtattttccttcaagccgaaaaggttaaccgtaaccgtcgtttgtatcctaaaaacgtacttgaagaagcagttaacgattatattagaactcaagttaacacccgtcaagcattaggtgaaatgaatcaccctccgcgtccgaatgtggatccgcgaaatgcttgcatcctgattgaaaaattatggtggaagggtaacgatgtttggggccgcgctgttgttgttgaaggcgacggtggtgatggtgacaaactggcggcgttgattcgtgctggttgggttcctggtgtttcttcccgtggattaggtaagctctccgattccggcaaaggctacggcgttgtacaaaagggctttaaattagctgtaggcgttgatgtcgtctgggggccaagcgcacctgatgcatatgttaagcctatagtggaaaatcagcaaagcaaaccgcttgttgagaataatagtgctgatgacgcatttcgggcattgtccgagcgtttgaaaggtctataaatacattaaacaaaacaacaggaaaatcaaaaatgcttaaagaacaactgctggcggaagcccagaacctggatactccggtcgagttagacagcattttcgaatcagttgaactttctgatgacgtgaaagcgacattcaccactgtattcgaacaagctgtaaaagctggcgctgcaaaactcgctgaatcccacattacccagatcgctgaacgttccgacgaactggtcgaagctcaggtaactgaacgtgccgctgaaatcgaaactaagctgtacgaagatgctgataaatattttgcgcacatttccgaagaatggctgaaagaaaacaaagaagccgtttcccgtgacatcaaagccgacctgtttgaatccctgatcatgggcctcaaagaagttctggttgaacataacgttgtcattccggaagaacaggttgatgtagtcgccgaactggaagacgaactgactgagaatcagcaggaagttaaaaccctgtttgaagcgaatcaggaactgaccaaagaaatttcagaaatgaaacgcaatgcagtagtttcagagaaaactaaaggtttgaccgaatctcaggtcgaaaaagtagaatctctgattgaagggctggaatattccgcaaccttcgaaaataaactcagcgcaattgttgaaatggtagcaaccaaagctgaaaaacccgttgacgagtctgtaaatactccgcaaacgaaagatgactttgttccggtagttgaaagtgttccggcagagaaatccaagatcaataaatatgtacaagcggcaaaagccctttcttaatttcaaaaggtaagaaacaatgtctaagaaaaacgaattgatggaaaaatggaacgatcttctggagtctcaggaaggcttaccggatatcgctaccaaatccaaaaaacaactgattgctgccattatggaagcacaggaaaaagacgcagaagttgatccggtttaccgcgacgagaaaatcgttgaatccttcggtggtttcctggcggaagctgaaattgctggtgaccacggttacgacgcaaccaaaatcgcttctggtaactcaagcggtgctatcaccaacatcggccctgctgtaatcggtatggttcgccgtgcgattcctaacctgatcgcgttcgatatctgcggtgttcagccgatgactggccctactggtcaggtgttcgctctccgcgcagtgtacggtaaagatccgctggcttccggtgctaaagaagcattccatccgatgttctctccggatagcatgtactccggtcagggcgcggctccgagcaacggctttaccgaactggcttccggtactgcgatcgctgacggcgctatcgtgttccacgatttcgttgaaactggtcgtgtgttcctccagaacgtttctggctctccggttactgtaactggttctaccgccgatgctctggatgctgctgttatcgccgaacaggaaaaaggtactctggctgaaatttcttacggtatggctaccagtgtagcagaactgcaagaacagttcaacggttctactggcaacccgtggaacgaaatgggcttccgtatcgataagcaggttatcgaagcacgtagccgccaactgaaagcacagtactctgtagaactggctcaggatctccgcgctgttcacggtatggacgctgacgccgaactgtctgctattctggcaaccgaaatcatgctggaaatcaaccgcgaaatcgttgacatgatcaactataccgcacaggttggtaaaactggtttcactcagaccgttggctctaaagctggtgcgtttgacttccaggatccgattgatgttcgtggcgctcgttgggctggtgaaagctacaaagctctgctgattcagatcgacaaagaagcaaacgaaatcgcacgtcaaactggtcgtggtgctggtaacttcatcatcgcttcccgtaacgtggtttccgctctggctcgtatcgatagcggtatcactccggcaggtcaaggtctccagaagactctgaacgttgacaccactaaagcagtattcgctggtgttctgggtggcgtgtataaagtatacatcgaccagtatgcacgtggtgattacttcaccgtgggttacaaaggcgataacgaaatggatgctggtatctactacgctccgtatgttgcgctgaccccgctgcgtggttctgatccgaagaacttccagccagtaatgggcttcaaaactcgttacggtgtaggtatcaacccgtttgcgaactctcgctctcaggctccgtccgaccgtatcacttctggtatgattaccaaagaaatgttcggtaaaaacgcatacttccgcaaggtttatgtgaaaggcatttgatcctaagttattgaaaaataacgatattaaagggaaccttcgggttccctttttcatttctataaatagtgaaaacgattgaggctatattatgaaacatattatctacaaaataacaaatttggtcaataataaaatttacgttggtgctcattcaacagaagacatcaatgattcatacatgggttcagggattgcggttaaaaaagcacaaaagaaatatggaatgaataactttgtaaaagaaatattacatgttttcgatacccgtgaagaaatgtatgaaaaagaaagagagatcgtcaatctcgaattcataaatcgtccagatacgtataatgctggcataggtggtaaaggtgctcctatgtcattgattggttggtctgacgaacaaaggaaaaagatttctgaaaatactgcaaaggctatgcgaacaccagaactaagggagaagatgagacaatcccgtttaggtaaaccacagtccgaagaatccaacaggaagcgctcagagacgttaaaagctaaatacatgaacggacgtacagacagagagtataaacctctcacagaggcgcacaaggccaaattaggccgttctgtatcgatagatggagttgtatactcatccggatcggaggcggcaaaatcccttagtatgtcccactctggtttaaaatatcggattaatagcgacaaataccctacctggaaatttgttgcataaataccattatacactttacgcaggaacataaaatgagtgaaaaattttacacaattaacaagctggtgcgtcagtcacagctaccgcctggcctgtctaaaaaggttcttgatgaggcaaccggaacagaaacaattaacgtagctaatacccgtccggatctggtatctcttacccgtgcggtaaacaacctgatctacggtgaacttgtagcgattcaggaaactaatttacctaccgcaactctgttcggtgtgcgttatcgtaaccctaaaggcgatatgacgttttccagcgctgctacatattccggtaagtatgcaagccgcgataatatttcaaatggtgcggttggtactgcctacaccaaaggccaagttttcaaacacccgacaagtgatgttgtatacgaagtaactgatagcgtaactctcgcaggtgctgatattgatgaagcgattatggtcgcattattcagcaataaattacgcctggcaagcgaagccgcgccaacaagtcaatatgaaaccagcgaagatattagtacaacttctttcgaaatggatcgttggaatatcaacgttcgttcccgcaaattcaaaactgaaatgaccgtggaacttatgcaggatctggaagcaaaccaattcaacgcagaaaatgtgattgaagatgttttgggtactgttgccagtgaagaagtaaacaaagatatcattcagactctgatcaacgtatcaaatcgttacaacgttgatggtgtggtcacaaatggcattttcgatgctacaaccgcatacactgcaaaggatgctccggctttaggtcgtttcctgtatcaattagtgtgtgaaatggggcaggaaatgaatagaacgacttcatttgaagctacctatgtcctggcctcttctcgcgttgtaggcgttctggctgcgtctggttggatgcatgaaactgatgaaacccacccgttagcaacaggtcgacttaaaaacggttattatgtctatactgacaccaatacaccgtttgattacctgctgactggttgcaagtacgatctgggtgaaatggatcatgttggctctctgttctatacgccatacacagaagctgatcaggcaggttcgatcaagatttctgttgatcctcaatccttacagcctaaagttgctattctgatgcgctacggtttatcggttaacccgtataccactgctgctaatgaaagacttgtgaaaggtgatgactgggtaaacctctcaggcaaatctaaaatgagtcagattgttggtatcaaacttcctaaactgggttgatagtataacccaacggggataatattcaataggtggagtagggaaacttactccatcttttaataattattataattaatattaaattagatcttgaatttataaatgatttatgataaaatttattaattataattattatagatcaaataatttttgaaatcaagtaaaaataaatttgattttataaattagatcatgtataattattcttttaataatatattatattagatcaatttaaatttgactactaattaatatagtatattatagatcaactgggtaaattggtgagtatgttatgagtttgaaattagaagatctacaaaatgaacttgaaaaggatatgctgatagatcccctcaagttgcaatcagaatcagcggatatccctaagatttgggctaaatggcttcgttaccattcaaacgcgaagaaaaaactgatccaacttcatgctaaaaaagaagctgatgtgaaggatcgtatgttgtactacaccggaagacatgacaaagaaatgtgcgaagtggtgtatactgggactactgaaatcaaaatcgcgatcgctggggatccgaagattgtagaaaccaacaaactgatccagtattatgacatggtggtagatttcaccagtaaagcactggatatcgtcaaaaacaaaggatactctatcaaaaacatgttggagatccgtaaattagaaagtggtgcataatgtctactaaaaatgaaaaatgtgtagtgtgcaagtgtccggttccttctactggttatgtgactgaatccgggcgcgtgtgtagcactatctgtgctgactacatcgcagaaaaaacaaaaagcggcgagatcaacgaatccgatgatctgaatgaagttcaaatgttgctgtaggagaatcttatgattggatacggtgaaggaattacagatcgtgatgaacgtccggatctgttagaatctgacgaacatcctgatttttaggataggtaaaactatgccataggcatgacaaaccgattatgcgtaatgaatgaggcttgtacggggttctttgcctggatctcatagttccccattacggaggcaaaacgggcgatggaggcaacaaaatcgcgtcctaaatacatgtgtacccgaaaggggcttgataaaagaatgctggatgataggcgtactcttttgcgccgtccgatggagtttaccttcggcggggtgattgataatataccttcgatcaagggcatgtgaatagaatagccagaatagtacagcactggcgttaagcaaatgtacaaaagccccttcctttcggttggggcttctttttagaacttttcttcttctccgctttcgagttcggcctttaattcttcggctcgacctttcagcgcatcgcgcatagaaatatcgtctgacggcgcaacatcaacttcttttacacgatttttgtaatatttttcaagctctttaaggccgtccatagtacggcaagaggcgaccttgctcatgaaatcatcaatagccgcctcataaagtcgaaaatcgttgaaactcttcattttgacctctaaatttcgatttgtttgatcacgtagtcaaacttttcttcattgtaaatgcgtactcgttcgattgcgtgtttcataccatagtttttgtatgaatatttatttttagcatttttggactttgccagcgttgctaagttatcaaccaaatcccaaacagtagcaagagatttagaatcatgtttacgcagtacgcgcccaattgactgtttgactataacagcagatttgcaaggatgtccgaagatgatgtgatgcaggttcttgacagaaatacctgtactcagtacaccaatagaaccgattacgatcagccccttcgttgattccgcgatccgtttcatttcgtttcgctcatcaatccccgtttccccagaaatgtatacaacgttgtcatatacctttttgagttgctcatacagccatttaccatgtttgatctgattgaacatcacaaacacgttttcatctttttcccttgccagtttcaacgccagcttacagatccatgcgttacgcctggtatgcgatgttatatacttgatttcgctttggtaatcagcccccttcattttcttaatctcatcctctttatatctcatgaagatggtattaattcgaaggttggtaacttgaccttcctgcatcaaccgatttgtatcaactggcttgaagatttgaccaaaagcgccaatgtattgcatcatgtttgctttgccttctttcagagaaccagaaaggccaaacttgaaaatacactgatccattgtgttgatgatcttctgtatgctttgtccggttgatttgtggcattcatccaccatcaaacacatgaactgctgaaaccactcaggaggcattttaacagccgattgccacgtagacacgtagatcaatgcattactgtttttagcagttcctgaccgtattccaagcattgcctcgcgaggtaaaaggcgatagttgacgatatcaccgatcatctgatcaacaagggcagttgttgggacaatgattagtactttgcctgtgtaattttccagacaccaacgagatatcaacccctgaataagagatttacccgctgacgttgggaggttaagcacagcacggcggtttttaatcgcatgaaacaccgattgtttttgataccaatacggatcaatttgcttgtttccgtcgtatactgggtgttcttctaaccacttgtcaaaatctggctgggtaatttcttctgtttcgtggatcttaggatccatccagatagaatacccgcgagactccgcgaattttgttacaagataggctaaaccgtagggcagtttcccgttatagtccatcaagtatatgtagccgttccatccaccatatttgtattttgcctggtactgataacctggcggctggaagctgaaatagtcgcgcaattcatagactatgttagcctctgcctgaatctgcacatgactagtgttaaggaatttgacttcgatatccactatgtgtatcctatatacggtttatatgaatatttataggctaaataatgataaacattggagaactacaatgagtattgattacgaaaaggttgaaggtttcaaagccttagaacaaaaagaagccaaattacagcttgctacctacgcgcaagaaacgtttgatgtcaaactgaaccgtcagaagtcattcgaaaatatgcttgctgatctggaagctgccgtaccggaagaaaaaccggaactgttgatcgactcccctgatccggaaatggttacatacgaaggtgaaccatctgttcctgatgttgctccggaaattgccgaccagattgaaattgttcccgacgctctacaagctcctacaagcgattctgagacggtttctgatgaactggcatggatggaagggtttaccccgtctatcatcatgatgggccgctctgtttcgaatactggcttttatacgtgtccgtattggatctatgattggatgaaacaaaatccggattggtataagcaccctgatggttgtcctcattattcagcgcgtcaaaccctcaagtcactggcatggtacatgcaccgtgatgggatggttactgtacgcgaaaccagaaatagccagttcgacacgttcaaaaaataattttaaaaagtagttgaccttaccctgctgttcgagtatatttgtattcgaaggcgggggaatggctctcgcagtgaagaaggaaatacaaaatgaacatgatgaaaaatgcttactacccagttctgtttgtttgggctaatggtgaagttaagaaaatcgtcaattctaaagctccttattacactgtaggtgaagcacttcgccacgctgcggaagcaaattatcctgttcatgctgaacctggttatgctcgttggaacggttctaaatgggttgctgatacctgggacaactacgaagaagaaagaatggagtgtgatcctgattacgtatctcgtcaaatggaagctcatatgattgcagatcgtagactggataatgaagctcgcggattctattgattaacaaggggctacggccccttttcttttaggtgaaatatgaacttaaatcacgaatgtttaaaagatttgagcggattggtaacgttatttttcttgatatcgatggcgttctaaataatatgcggtgcatgaaatttggtgaacatatggacatcgaatgcgcacgacacttacgccggatagtgaatcacgctaattgtgatatcgttatttcctctacgtggagaatcggcaacagtacccataatctacgtgaaatattttatccgtggggattgtatcggatcattggtaaaacttgcactaacttccctcatagcactggaatgcgtggtgatgaaatcaaggcatggatcgatactttcggatgtaaaaactatctcattcttgatgatgacaccgatatgctttcttcacaaaaagatcattttattaaaactgatgggtttgttgggttgaccgaagaacaatccacttatgcgatccgtaacattttcggggttactactccgttttgtcctgaatgcaatgggtatggacgtgttaacggctacgacaaatgcggaacgtgtaacggtaaaatactccggctataaataccaataaacataaagaggttaaatttatggcaattccttctgtaacaattagcgccaacaaaaacgaacttttgattggcgaaactttgaccttagaggttgaaactactgaactagatccgggtgatgtgtttctggcctatcgttggcaaaaagatggtgtagatattccaggcgcaaccgccgatacttacacaactacggttgacggtacaactgctggcgattataccctgatcttaaaacacggtgctgatgaagaatcagcaacagaaaccacgtctgatacaatcaccgtgaccacttatccggtaatcgcatttggtactgatttacctgcaacaaaatctgttgttactggtaaagaacttaccctgactgttgcggtaactggcggtaaaaccccgtatacctatgtatggaaacgtggttctactgttgttagtggtgattctgcaaccttaacaattagcgcggctgcaagtggtgatgttggttcatatacggtagaagtgacggattcactgggtaacagaaaaacttctggtgcttgtgctgttagcgttacacctgctcttgcgtttgataaaaatctaagcccgaccgcttccgtaacacaggattctgcattgatccttagtgtaactgtattgggtggtacttctccttattcttatgcatggactaaggatgattctccggttggagacgatgcggatactcttacagtggcaagtgcggctctggatgatgcaggttcgtataaagttgtagtcactgatgcgaattcagataccatcacatcaactgtatgtgtcgtaactgttaatcaaaattatgatgatctcgtttctaaatggacggttcacccgattccgtggcgtgataccagctttaccccgatcggttattgggtacttgatgaaattctgtatcaaaaagcacagggtaaagattggaaaactgattatgctgattacaagtatagtgaggaagtacaaacgatcctgaaagcgttcatggaaaacggtgaatgtgagatccaggattcacgaaacggctatattcataaaatgagtgaaatctaagaggctttaaatggcaactgaaaaatggactacggttcatcctattccgtggagaaataccagttttacatatcttccatactggctatacgatattatcgttgatgcttttgagaaaggcgacgactggcgcgattatgcggaagaaaaatataaattagagtttgatactctgaaagaggcgtttgaagattatggtgatattcatgtaatcgaatctcgtaatggtaaactggttagtctgttgtcattgactcctgctcctgaaccagatcctgaccaataaaataaggcaaacaatgaatacacttctttttgatttcgacgacactttagcagaattttctcaggctttttatgataagttcggtgtacgtccggaaggaacgccaaaagaacgatatgacgaaatggcggcttctttggtgcgtactgatttttataaaaaccttccccgtattcaggctgggatcgacctccttcaatggagtttccaacgccgaatcggtgatcctgctactttgctgcttcgcgcggaagcggtcagccctctttgggttatgaaagaaaaactgaactatacagataagatttgcgctgaactggggatctctcgtctcgattttagtcgcattgactatccggaacagttcgcagaacacgcctatcgtggtgttctgatttcccgcaaccagaaacatcttgaaatctggaacaattctcatctagctaataaagttcctggtattttccttgcggaaacactggaagaaaatattcagctagtcacggaagcgcttgcaaaggctaatcaataacaaaaaagggaaccgcaatggttccctttcttttacaatctttttaattcatcaagcgctgttttcttatcaccaacaaagaggattgctttacctcctgcttttctgaaaggcaacaccgcttttgcccgatcgtcaaatagaattcctttaccagcgaatgctgctttttcatggctacttttaacgtagtggaattctggaacgtaacccaatactttttgcaatgctttacgtttttgttcggcaacaccgtcagaattgaatttaccgacactggttagtattgctacatcaccaagtgttcttaaatgatggaataattcaaatccttctttgattggttccagattttcgtagaaatcagttttggcaatttttgctttgcactttttcaactcatcttctgtcatcatagagggttcgccatacattggcacaaatgaaccttcccagtcgaacaatacaccatccatatcaaagaaaaacttattcatatcaattcctcagtttgtgtatgcatactataatgtttaatcattaatgtcaaccccaagtgtcagttttcggtgcgtatgctgcaactttagccacaatttccttatccagttcagctacagatttctgaggcttaccacgggctttaactttgatgtagtttgacttaacaacaaacatccctttgttacttgatttcttgatctcgctgtcaacaccaactttgttaaaactgatccaaatgtctccgtccatatactgtttaagagaatcacccatgttcaggatcttcgccatagtaagggccgcgccttcgtgggtatccatgagaatttctttaggaactacacgatcgcgtttctggttctgctgcatagcaatatgaacatcgttcataacccatacgatatgtacgttttctttcttgtatcccagcttttcgacatcacgcgcgatgcttgccagcttgctcatgccttttaacgttacgtcaaagatgaggttaggtttacgatcttctggtgctgccataataccggaataaacacggttttggtttttgttggaaatgttgaaaacgtcggcgatcacatgatggagggtagatacgttttctgggtttttgaggttcattgttttgacatcatggcccgtttgtttcttgatctctgctgcgagtttatcgctacccattacaagttttttcagggcgtcaacgtccagggtaataccttcgatgcctagcagtttttccagtgtgaaccctttaccggaaccagcaccgccagccagaataacaacctgaccgaacttaggataagcacggcccccgaaggtgatcagcgcttcggttaaggtgctttctgtgaattgtttaaatgacttcatgtaaaattctccagtttattttctattatttattgacatgctttctgacagtggtgtatggttactgtgttcgacggataggccggaagaactttaaaccataaggtatacgatatgaaaatcaatttacatcgcttcattgcagacttttcccgcgaccgcgacatggattctttcaactattactcccgtgagattgaagatcgttttgcggctcatgttggattccgtcgccaccatacccctaaaatgcgtcctgaccacgacccgaagtatagccctattatgtggcaagcccctatcgatggttacgttgaagggatccggatcatgacgtttaacgcgatgtatggaaacgctttgatccatatcgcacgtgagaaaaaggcggaatttcctaacggctggcgtattgatgaagtgattcaaaatcttatgcagttacgacgtgaatacaaagcgggtatgtgtctgcgtaatgaacagtatccgatgtataaaacatatgcctatatctctaagcatctaattaattccatgttttacatcgttggtaatcatggttccgctatagatataggttcttatgaaatcgtggcttatgctcgcgaacaaggaaaggccgctgcactgaaaatcatcgaatctggtgctatcattcttaaccatcgcattgatactattgcttactatggtgatcaggttgaggttgaaggcgtacaccatgaaagattcaacaaagctgtatttactaaaaatggctatgcgtatggtaatgaaattataacttctgctgttcctctcgttcgcctaactgttgaagggtttggagaaaggatgccttataaaccgtcagaagctcaaatgtgcgcggctgctgaaagaatcgccaaaaagcggaaaatgtataccgatgaatacctggcgtatgtcaacaagacaaaagaagatgtagatcgagaaatttcttgcatggatttataactttgatataatctaagcatctttttaagggaggatacatgaaaacgatacattgcagaaatgaaaacgttgtttactatcacggttcgtgtactgctgctggtattgaaagcatgttattgcctccctgtgattctgatactctgtctgaaaaaggcaggaagaaaaatttagaccgtgttttctttaccgctgatatcgggttagctcgtatatacgctggaagggccgcgcgttctataggtggggatcctgttctgtacagggttgtgtgtccggttgatgttgtatgcatgaatgaagataaaggcgcgagcgtttaccatgcagcatgggcgttttgtgaggaattatgaatgataaagtgttggcgtatctcgttttcttgctgggatatcgcttagaagtgatgggcgcgtattcatcaatgtatggtgatttaacggctatctggatggtcgggttaggggttgcttttacattcctttcctttgcaattgttaatgaatcggaaaaggatattgtatgaaactatatcatgtgatctactctggtgttttaggcattgacaaacaaatgttaattgatgtaatgtgtaaaaaactcgatgaacgaattggaacccgatacaaaaatcatgtatcggaaagtattttcatcaacgttgaccatccaaatgacatggaagaaatggtcaatactcttgatgatcagcagatcccgtttgttgacaatttcaacatgagcgctggagtgtatacggtagtaacttttgttctaaaaaatgttgacagccgaaacgatagcgtgttgaatgtagttgcaaaaatcgattctaccaaaggaaaataatatgaaaattgtacaccgtagcatttccgaactgtctcaagccgaaaaagtgcaaattcatttcaaattcaatgatttgcgtaaaggttatgccgaaattgcccgtgaatatgggttagataacggcgatatttaccaggtagtacaggaaattgaacgtattcgcgcgttccgttctgcaaatctccctgttaaaaatgcaatgcgccgcgaagcgatcgaaattcatcgtaagcgtgtgtacaatttagaacgtgctaaacgtccgatgaagaaagaaaagaaacctcgcccgtttaaacgcgaacatcttaacacctctatggcgctggcgtttcaagatgcggggattatctaatgcgtaaatctgcgatggatcgttgggctagtattgctacttcaaacgtaaaaccaaatcaagccgcacctgatgtagaagaggttcgtaaagcaaaagaacctgagatcgtggcccttagccctgaactcatcgagcatcgccgccgtgcgtctgctattgaattggatctgcgtattgcgcgttcatacaatctcaagcatgaacacgccgcaaagaacaaccattcttttgaccttactctggaagattggaaagtattgatgacaactgaacgttgtcagtattccggcaagatgtttagcaataaaccaggtagcccgtatgcccgtacaatggaacgtattaatccacgtctgggatatacacaagaaaatacaatagcggttatcaacgccgctaatgccgaaaaatcacagcttgatgcattcgttaagggtgatgtcattctggatgaagtaaaagtgaagttgctgcgtaaagcactttatcaagtcgaaaaacgtgtgaaaatgaaaggttaaattatgtttacaaaatattcttctctgactaaccattatgaaggtaagttcatcaatggtgtaattatgaacgggcttactggcggtgtgtgggttgcgcgtgaaaagatccacggtgctaactttagctttatcactgatgacggtgttaccgttacccctgcaaagcgtactgatgttgttaagccaaccgaagatttttatggctgttcagcagtagttgcaaagtattcccctgggatccgtaagatgtgggaaaccctcaaaaagaccggaacttatgatgatttggttattcaagtctacggtgaatttgcggggcgcggtgtacagaaagatgttgattacggcgaaaaagatttctacgtattcgatatccgtgtaaatggtgaattccttccggataatctgtgctctctgatctctcgatctcatggccttaaaatggccccgttgttgggatatgggacttttgaagagatcaaagaactgcctctcacgtttgaatcggttgtgaataaagcaaatagcggtattggtagcgatgacacggtctacggtgaattcatttatcctatctcggaagttgaagaggggaacattgcagaggggttcgtaatgaaacctgttctaccttctttcatgccaaacggtgaacgtgttgcaatcaaatgcaaaacaaccaaattcactgagaagaaagctaagaaagcaacccgctttaatgctccggtttcactgtcagaaaaagacaaaaaccaactcgatgagtttgtttgttaccttacagagaaccgtgtgaaaaacgttctttcgaaactggatctggcttcgatcactgcgaaagatttcggtcgcattatgggcttaacggttcaggatgctatcgaagaaatcagccgtaatcatgggcctttcctcgaacagttcgaagacccagcaatggctaaaaagctgtttgtaaccgaagcccaaaacatgattcgccctgtatggggcaaaatcctgaaccatgaattttaatcagattctggttgatgcaaaagcggctaccctgatcggtagccgtaaacctcctgaacgtatcgcaaacattgctgttaaaatcggacgtgctttgaacgaacgcgggattagggcttattctggcggcgctcctggtatggatagtcactttctgtttgactatagtccggataacaggtgtataatccttcctgagaacggttttaacggccttttctcaaacggaaaggatatcatcgactttcgagatttaaacacacagaaagccgctgatgaagccagaaaggtagcaggtaacttcgatacacagaatgaatacgttcaaagaaggtatgcgcgaaacacgattcaagttcttcgtgaaaatcttgacaatccaactgattttgttttattttgggcggaagaacgtgaaggatgtgttaaaggtggaaccgcgatcgctgtaagattggctaggttgtacagggttccatgtttcaatctcttcaaagaaagtgtattgaacgatgtgtgtgatacgttagggatcaatatcaaacccccaacgttggattttttatggtaattgaacatgcgcccttacttcgtgaaacatacgaaagatgggctgttaataacgcaataggtgaaaatatgattcatgtacgtagtatcggtgctgacggcgaaactccagtagaaggccgatcgcccactctcgcagaacgagcaagagaaattatcaacgatcagaatgctaagatgatcgaacatgcgcgggatacaatcacaaaaggtgttctgaaacacgcgacacaacaaaaccttatctatgatatgaagcacgatatcggctcttgtctgggtattgaatgtactcgctatgcattccaacgagtttctgaatggttggaagaagaagggctaaaattcgatacagaagaaaaacgcaacgccgctaagatcacaaattctctggctagtaagtacaatcaaacgtatagaaaccaggaagaacgtgaagtgttcggtttcaaaattcctgaaaggaaaacagatcgccgtgtaagtgaattcactttttacattagttggtaaaaaggtgttgacgggggttggttatagtagtattctaactcccgtagacaagacactaactcagaaggataaacatcatggaaatcgtaatgaaagcaacttatgctggatactgcctggaagcaaaaggtgttgctaacaatggtaaaggcttacgggccaatgttgaagcaatgctggatgcattacatgcaatgtacgaatatgacaacgtagcgggtagtgttcttatccaggcgttggaagtcgatggtgttgattgtgctggttggtgggatgcttacattgactacaacgataaccgggtttacctgttgagcaacaaagattatttctaaggaaccattatgagcgatgaagctgaggctttagaagattgggctgattttgatgacgaagaagacggtgaatatttctgcgttaatcgtggtgcttataaagaccgtttagaactccgtaaacttttatcgggttcctctcaaatatcaggatccaaacgaaaaagtagtaaacaaaaagttcagtatagtgatggttctgtacgtgatgaaactgttgttgctgaattccgtggtcgggttatcacaaaagaaagacaaattgatgtaaagaacttgtatgaagtggctaaggctgctaaaataggttctgtgattgtttgccctgtgtgcaaagaaaaacacacaaagacaacgtatcacaaagttttctgttcgaatggcagaaaaaccagtaaggattgtaagtctaaatatcacaatacaatccatcccgaacgactggatcgggtattttaaaataaacctaaaacgtggagtacgtttatgaacaacaaaactttcgaagaactgaacagcatcatcacttccgtagattcctataaggtttctcactggtcgcaatatccaactggctccgaagaggcgctgttttatattgaatctcgtggtggtaaatttgatcaagtagttacggctggctgtaaccgccttgcgcaaatcctatcacgtccggtgactatggaaaacgtagattttgctaatcggttgtacaaaatgcactttgggcgcgaaatcttcaactacaaaggttggaaagaaattgcagaactgggttacatccctcttgaattcagagcgattccggaaggaaccccagtagcggttaaaaatccggttgcaactttccatgctgggaaaaatgcgctgtggttagcaggacacgtagaaaccctggcgatcaggggagtatggttcccttcaaccgtagcaactctatcccgcgaatgtaaaaaagtgttgaagaaatatctcaagaaaacctccgatctcgaaggtgaagcatttgatatggtattacgtacccgtttgcatgacttcggcgcacgtggaacctcttctgctgaatctgctggtattggtggcctcgctcacctgtataacttcctcggtactgataccgtagaagcgctgattatggctatctctctgtttgaagattgtcagaaagcgtttgatgatggtgaaatggcggctggtatttcaattcctgctcgcgaacattccactaccgtttcttacggcaaagaaaacgaagaccttgcatacaaaaacagtattgagatcttcggtgaagggatgtatgcatgtgtgtatgattcctgggattttaaagcggcggttcgccgtatcgcagaatataaagattctattctttctaagggcggtactctggtagttcgtccggattctggcgatatggtagacaatatcatgtacgctcttgaagaactgggccgtatctttggctatacagtgaactcaaaagggtataaagtactacacccagcagtaaggatcattcaaggcgatgaaattcatggccctgaaacaatcaatcgggtgttgaactggatggagtctaaccgttgggcgtctgaaaacatcgcgtttggtatgggcggcggattgcttcaagaagttacccgcgacactcaaaaatatgcgatgaaaatgtgcgcaatcaaaattaacggtgtgtggactggtgtgtataaatgtccaaaaggcgctgaatggaaaaagagtaaaaaagggttgttaatgactatcactgatggtgttaactttaaaaccattgatactctggaacagaaagtgccggaaggctggaaagatgctatgatcacatactatgtcaacggaaagattactgcccgtgacactttagaggaaattaggaaccgtgccgggatttagtatccgcaaaaacgacaaaggaaccgtgattttctatgacaacattccccttgtagctcgcaaggggctttttgctaaaatcgctgggtattcctttaaactggaagaagtcaacgacgaaacactaaaagagatcgtaagaattgccttacagttaagaggtaagaaagacgaacagaaagctattgacatgatcaataaattgggtgaaactcaatgctttatagtgaatcgtggttacaagtacgataccattgcaaaatttgaaaaagggctttgtgaattatgagttattatggtgtgatcccatacacaggaaacaagcaatcgctattacctgaactattcaagctgttccccgaaagaagttcatacatgcgtttcattgattgtttttgcggtggccttagtgtgtcgctaaacgtccctaaacccgttctaagcaacgattatgataagacgctgattgatatgtatgagcgtcttaaaacgcttcctgacctgtctccggtgcgagaattgattgcatcgaaggggctggggaaagacaagaaagaagagtatctgaaattccgtgatgaatacaaccagaacaaagatcctttatggctctatgtcctgatcctgcattcattcagcaacgttaaccggacaaacgacaaaggcgattttaacgctgctgtaggaaaacgaaccctcaactttatgacagaaaaacgtttcgaacatttcaaaaagaatgtgacaggaattgaatttcgttctggttcatactctgatattgaaatcaacgataacgattttgtttattgcgatcctccgtatctgatcactgatgcggtgtataacaaattctggaacgcagatcacgaacgcgagttatatgctttccttgactccctgcatgagcggggtatcaagtttggtttatcaaacgtgacacatcatgcaggaaagcaaaatgatatcctgatcgagtggatgcaaaaatataatgtgcataacctcgataaaaagtatctgttaggccagcatactgattcttacgaacaaaataaaacgcaagaagtctacgtgtgcaactaccagaaacgcgacgtaaatacataccctgaaacactggatgacttaatgtaaggtaacatatgtttaagatttttggttatatcccttctgtttacaattgcgctccatgcctgaattctaaacgtctcctggacgcaaaacgaaaagaatatgagtttgtttctgtagccgatgaaaaagacgcagacggcaaaccgatcctgaatgaaacggtcatttctgaactcgaaagcctgttaggtactcgtagactgaccatgcctcaaattttccacgatggtaagcacatcggcggctttgaccaactgcgtgagtacgttcgcacgttgggataaatattaacacctttatttgattggtgttattatgctcactaaacgtattactaagaaagattatccatccattaaacaagctctttttgaacagcaaaacggcttgtgcgcgttatgtggtcgccctttagagggtgaccttgaaaaacatcaccttgaccatgatcatgctctatctggctctaatgccggacgtgtgcgcggcctcctatgtaacctatgcaacggtacagaaggtattgtaaagcacaaatttaatcgttctggtctggtttcccgtgatgttgattacatcgaatggctagaaagcctggtagcatacctcaaacgcgactattcacaaaaccgtatgcacgacaaatttatacccgataaggttaaatggtttacacgcctgactaaatcggatatgatagccgaaatgatttctatgggctttgagtactcagaaactgaggatcgcaaggctttagcaaagagctatagaagacaattaatgaaggcaaccaaatgaaatatctaaacgctcgattatcaacgaaacagaagaaaaagctgatgatgttgatatccgccactgacaaaaataccatatctctgcatgattggatgcttggaatgggtgaatctgatttgtgttatgtcaaaccaaaagacagaccgatgtttgatgatcgcggttgcacattgactgctttttcttctatccccgttattgatatttggaaactccttgagattgtaggacgggatatacctgttgatggagttgaactaatcaaatatcttaacgaaatcggacataatttagatattatccataaggcaacgaaatgaatgtagaaaaacgagacggaacaatcgtcaaattcgataaagaaaaaattc

SEQ ID NO: 30 - DNA, 48816 bp, unidentified
  source 1..48816: mol_type = genomic DNA
atgtctgaagaacgtagaaaacgcgtaacgaaatcgcactttgaggggaacttcaaagcgctatatgaaaaggagttcggcgtggtgctagggcgcacagcagagatgacgccggaacaattttttgatatcgcaaagcgttacttccagtgggccgaagagaacgcaatcaaggctgcggaaacggcaacgtttcagggcgacgttaacgagtggggagtgaacaagcctcgcatttttacgatcacagggttaagcctgttttgcggcgtgaaccagtcaacgcttgggcgataccgtcacgaccccaactatgctcccgttatggagttcatcgactccgtgatttatgagcagaaatttcagcttgctgccgtcggcatgattaacgcttctttcgtcggtaaagagatggggatcgataagccgccagtgctgaacatcgacgctatcgccggggataagaacgagatcaccgaagagcggttagagcaggcagtgaccaatattcttgataagctataagggtcagatatgaacgaaatgatcatttgggaagacctgtcgccagccgataagctggcaattaaggcgctgagtacgcgcaacttttcgctattcctgaagatttggttccagatcatccagggagaaaagctaatgtggaactggcatcactcatacttttgccacacggttgatgaaattatcgccgggaagcgcaagagcacgatcgttaacgttgcgccaggctccacgaagacggaggtgttttcaatccacctcgcgccgtatgcgtatctcaagtgccggaaggttcgcaaccttcagatctcgcagggtgatgcgctttcaaaaggcaactcggatcgcgtgattaagatcttctcatcaagcgagtggcaggagctatggccatcaaagttcgggcgcaagcagatcgatgaatttcaggtcatggacgataacgaccgcgtaaggctggaaatggtctcccgttcgtccggaggccagatcgtcggtaagcgtggcgggtacatgacgccggggtttagcggccttatcgcgctggatgatatcgacaagccggatgatatgttctcgaaggtgaagcgtgagaaaaaccacgtactactgaagaacaccattcgatcccgtcgagcgaagaagaagaagggcgacgaaacgccaatcctttccgtgcagcagcgattgcacgcgcaggatgccacctggttcatgatgagcggagggatggccatcgacttcgatcgcattgttattccggcgatggtaacgcgggaatatggcgaatcactccctgactggttgcgacctgagttcgaacgcgacgtgctttccggcccgtcggtggtcattgacggcgtggaatactggtcattttgggaggagaacgaatcaatcgagaacctggttgcgctacgcgaagccgatctttatacgttcctttcgcagtatcagcaggagccaatcgccctgggtggtaacgtgttcaagtcggagtggtggcgctattacggcgattccgacaaggcgcacgagcctcgcccggacaagttcgaatatacgttcatcacggcggacaccgcgcagaaggtcaaggagctaaacgactactctgtaatgtgctattggggcaagtatcgggatcgcgtctacttcattgacggaattcgcggaaaatgggaagcgccagatctccgcgttcaggccgaagcattcatcaagcagtgctggcgtcggaacaaggagtgcggaaaccttcgccggatctacatcgaagacaaggcgagcggtacgggtctaatccaggatttaacgaaggcggtaaacggcatgggcgagatcgtcccggtgcagcgcgataaagataaagtcactcgcgctatggatgcacaaccaatcatcaagggtgggcgtgtcgtgctgccggacaatcacccattcgttgcagagcttgaggcggagatgagcgcgtttacatatgacgattctcatccacacgatgatatttgcgacaacgtatttgacgccgcaaacctggaaatgaacctgagcgacgatccggtagagcgaatgaaacgccttgcgggattgaaaaagctgggtcgctaatacataatgtgggcctgacggcccacacttaaacaaggttgaaatatgaacaacattaaaatggatgactacaaccagatcttcaacggtggcgctggttatgcgtcaacactcgcgtctatcgcggcaagatttggaacaatgtcgcaggttgaagagttctatcatgaaaacggcatggcgaagaaaatcgttgacgtgatcccggaagagatggtcgctcccggcttccagctaaacggcatttcagataacaccaagtttcaatcggaatgggacgggttaaatctggagccgcaaatcaccgatgctctttgctgggcgcggctgtatggtggctcctacgtcctggcgatggttaacgatggtcgcgcgttgacttcggcagcgaagcggggtaagccgctcgaatcgatcgttgtttacgaccatgattccgtttccgtcgcagaggaggaaaccagcccacgaagcccacgattcggaaagcctaaaatgtacgaggtgaagccgctaaacggcgggcaaccgttcaaggtgcattatacccgtatgcactacatcgacggcgagcgagtaaccaacaaggtgcgccagctaaataatggcgctggtggttcggtgctgaataagtcgatcattgaagcgattcttgactacgattattcggaatatctggcaacgcagctactgaagcgcaagcagcagggcgtatggaaggcgaaaggcctggcgctaatctgcgacgacaaagaaggcgagtacgccgcccggttgcgcatggcgcaggttgatgctaattccggcgtcggaaacacgatcggcattgatgcggacgacgaagagtacaccgttatcaactccgatatttcaggcatcccggaattcctttccgcgaaaatggatcggattgtcgccctgtcaggcattcacgagatcgtgctaaaaaacaaaaacactggtggcgtaagtgcaagccagaacacggcgctacagacgttctacaaactggttgaccgcaagcgcaatgacgattacaagccgctgttagaattcctgttacagttcatcgtaacggaggaggaatacagcgtcgagttcgaaccgttgtcgctgcctaccgatgcggagaaagcggatatcttccagaagaacgccaacgcggctcgcggcctcgttaccgaccaggttattgacgccaacgaagcgcgtgatactctgtcggcgttgattcctgaactgaagctaaaaggcaacgctccgaagcagaaaaaacttccggatcgcgccgctggttcaggcagcacgcaaagcgcagagatcttaaacaacacggaggcggatgatgaaagttaacggcagaatcccaaactggcgttatcctgaagcaagcgagcgggatttatcccgctccatgcaggacgcaacaaccgatctcgtggtagaaatgcgcgatcgcttagaccgcctgaagttcgatgccacggcggaggaaatcagccaggcggaagacgatatcagcgaatcagccattacgttcttttcggtcgtaattgcggctcttgcctccattgggttgaccatctatagattcaattcgaaacagtggcttgcaattgcgatcgcggctggcgggcggaacaacgaatcagttatgcgcctgaaagaattcggcgctggcgggtatgaagactggtatcaggaagcgctgaggaagtgggaagatgccgccgaagcgtcgatcaggaagttagcaagcgatatcgttgctgactggacgacgaaagttagaaccgccaacaacatcggcaagtctcgcaagcagatcgatgaaatcatcgaaggtcgatacgctatttatggtagctggtcgcgcaaccgggcaagcggaatcatcggaacttttaacagtatgttgatgatgcagcgcctaaaagatgctaaagtatcgcattacttttggttcgggatgatggacgaccgcgagcgcgagagccatatcaagctagaaggtaagcgacgccccgttaatggtgacggcattttccccggtgaagagtacggttgccgttgttgggcggttccagattttaacaatgtagaggtatcatgatgaaaagagttcaaaggttcgacacggtaaagatgaaggcccgattcgatgagaacggctttctggttgatactccgatcgtggcgcgtatcggtgcgcagacgtaccagacgccaaccgggccgcgcgtcgagttccgaccgcgttcagaggtgtttgatgctgaatcgctggcttcataccagggcaagccgatcactttgggtcataagatggtgaacgcacagaacgcaaaaggccttgtcgttggctcgtgttccggcgctggaaaagaagaggggatcggcgttcttgttccggtgatgatttacgatggtgagtcgatcgagcaagccaaaaagcgcgtagcggctgagttatccgtgggctacacttcggtcgatatcgatcgcaaaggttggggcaataacgcaactggcgaatattatttcgacgaagacctaccggaaaacttcgaagatatgaaaaatgattccgtctctgattgggttcgctttgatgcggtgcaaacgaagattcgcgtgaatcacgtcgcgcttgttttccgtggtcgtgccgggattgcgaaattaaatcttgatagcgaacaagaattcccctatgatgacgactcaaaccacaaaggagctaaaacaatgatcattaaaattgacggcgtagatgttgaagtggccgataacgtaggcgcttacattgccaaactagacgcgcaagttgcatcggcaaccagtcaggtaactagcatcaccgcagagcgtgacgcgcttcaggccaaagttgatggcattgaagatgaagttgccgcccgcgttgctaaaatcaaagcagacgaagacgcaaaacagaaagttatcgctgtggtttctgccgctggcgtcaagtgcgacggcctggatgttaaggcgatgaaggttgcttacatcaaagaggtagacggtcgtgatctgtctgacaaagaagattcgtacatcgacgcttcttttgactttatcgccaactctgataagatggctggcaatcgctacaaagtcttcggcaaaaaagaagatggcgagcaaaaagacaaaggcggcttaccgaaacttgacggcaccgaaatcatcgatccgcaggcaaaattccgccgctaataatttgcggccttcgggccgctaccagaccaaataaacaggagattcaaaatggcacagattccagcttcttattcccgcaagcgtgatattgccgtagcggggcagatcgctgatacgtcgatttataatatcgatggcacttgcgttgctgaaggcgatatcaaagctggcgtactggtggcttccactggcgcagtttccaatggccacaaggtcgttaaaccagcaaccgcagcgagcgacatcattgtaggcatcgcgcagttctcgcaagcctactcgcctgaaggcaagtatgacgatgagagcgcagttaacgttatgactcatggccgcatttgggctgtcgcagacgcaactgttactgaagaagattgcgcgttcggttctttcgttacctttaccgcaaacggcaccgtagcgaagggtggtgccggggttatcaaaactggctacaaacacactggcgaatacaccaagaacgcagatggcacagttctggtgaaagttcaggtgcttcagggcgccgttgctccggcgtctggcgctggtgtataataagtagtggggcttcggccccatttttgcaccagaaaaaaacctttgacggattaacgattagtgatattcttcatctcgttaagctaaatacacaaacaggagttttcagatgactatgaaattagatgcattcgaacagagtgcaattaaggtcgcaatgcagggcatgggcgtcgacgccgcaaaactggatgcttacggtatctggactgttaagcagatgactcaattactgaatcgccagtatgagcaggcatacccgcagaccagcgcacttgagcttttcccggtaactaccgagatctcgccgaccgccagccgatttgagtggctcgaattcgatggcgtaacttctgcgaaaattatcgccgattacaccgacgatctgccgaccgttgaagcgatggcgaaagagaagtcaggtaaagttttccgcctgggtaacgcgtggtttatttccatcgacgaaattaaaactggcgcggcgctgggttccagcctgagcgatcgcaaggcaactctggcccgcgaaggtcatgagacgctcgttaatgatctggtgttcaaaggctccgctcctcacggcatcgtgagcgttttcgaccatcctaacattaaccgcatgaccgccagcgcggcttggggcgatgacgcagcagcggctgaaaaggcattcgaagatctggaagacctgctaaacatgatcgaagaaactacgctgggccgccatcacgcgaccaacatcgtaattcctccgtctaagcgtcgtcttctgacgaaaaagatgcctgacactagcggcgactcttatctgacctggttcaccaagaaccaccagaacatcaccatcacggcgatggcggagcttgaagatattgacggcgcaggaaccaaaggcgtgctggcatacgaaaaagacccaatgaacatgagcatcgagatccctgagcggttcaacatgctgccgatgcagccgaaagacctgcatttcaaagttccgtgcacctccaaatgcactggtctcatcgtgtaccgcccgctgactattgcgattctcaccgggatttaatcaaaaagcgccttcgggcgcttttttattgcattgcattatacaatgtgctttaatttgaaacctaaagtaaaccaatggagcattaacaatggccagtaaaaaagaaaccgtagaaaccgtcgaaaccgtagaaaccaccagtgccgaacaggcgtcgcaggttgttcaactacaaaacgttggtgcatgtgcaattcgctataaaggcaaaaattacgtctatgagcaggtttttgaagtgccggaagacgaaatcgaccgcttccgccacgaaatcttcaaaggccgcgtcgaattctacgacaacccgaaacgcacgcgcgaatacatcgcagcagtgaaggcgaaagcgaaagagatcgtgcagcctaaaagcgcggaataacaaaaaccaacaaagggcgcttcggcgtcctttttcatatcaggagatcgaccatgagttacacaattcaagatgtgatcgataaaatgcgcagccttgcacctccgcttaaagaagttccagatgaactgctgtctgcgtgggttgtgcttgccgaggagttcgtttgcaaatcaaggttcggggattccattgttacagcgatcgcacttatgaccatgcacctaatgtttttggatggcgcaatgaagcaagaaggcgaaagcctggaatcttacacgcagcgagtggcatcattcaccctgactggggagttttcccaaaccttcgatcgcgtgtcggcgtcaagcgacaacgaaatgctttctacgccgtggggaaaaatgtaccggcgtatgctcaagatgcgcggcggaggcttcggccttcttaccgccgggaacgtgcgccgctgcggaattggtaggtgatcgctatgaactacaaacaaatccaggcacgcgcaagcgcgggcatcaagtttttcagtgacgctgacggcgtattcaacaagtacacgaaaggcgctggcggcggaatcgatccggaaaccggggaagatatcattcctggcgaggtggtaacgacaatcaagggcgcgatcagggatgtaaatgaccgtgacattaacggcgaaaccatcctcgctggcgacaagcgcgggttcttcactcatgatgtgccaatcatggagggtgacgaaatcgaagtagacggcgagcgctaccgcgtggttaatgcccgtccggtaaaaccaacgggaaccgttgtcgcctaccgtccagttttacgcagggtggcgacttatggctaattatacgatccgggagtttacaggtgcgattgatgcgtggtgtaaggccgctggtgatgcgctggaggacgttgtaaggtttacgtgtgaagatattcaccgcgaccttgtgatgcgttctccggttgatacagggcgcttccgtggtaactggcaaatcacctttaaccgcgccccgctttacgcgattaacgcatacgaccaaactggcgaaaagacaatccagaacggcaaagccaacattgcactatacgcaaaaggggctgggatcacttcgatctggttcagtaacatgctaatctatgcgaacgcgctggaatacggccactcaaggcaggctcccaatggcgttatgggcgttgttgcgatccggttgggcgtttatgttactgaggcaatcaagcgcgcgagggcgaaaaatgcattatgatatggcgttaaaatgcaaggcggcagtggctaaatttgccgccgagaacgggttgagggtcgcgggggataacgttgactttatccccccgaaaggcggggaaacctaccttaaagtctcctacgtcgaggcggattcaagatcggttgacctgtcaaggaaatgccgagtctatctggcgatggttcagattgacgttgtctttaagcctggtatcggaaccgaccgagcgaggattatcgcccaacgcgttgcaaaatccttccctgaaggcaagattgttgattctgaaagtaagttatatgtgagcgagtgggcggaggtacacggcgtgcagaagcatgaggcgggttggttcttcccggttcggttcgcagtaagatgcgagagcgtggaggcgagcggttatcaatccgcctaacggttcttcgcagtgcttataatttcttgccagcataaaaatatgagggcataatggcggtgtaaaactttcattcaaacaggagtattcaacatgcatttaccaaacggtgctaaggtcttctttgagaaggctcgcggtgcggccattccgtttaccgcaatgaccaacgacgcgaaaaacccaaaaatcacagtggcggatggcaagctgaaggtaaaagatattgtgatcttaacagattgcacctggggagactttgttaacaaggtggctcgcgtgaaatcagtgacagcaggagtggcaacgctggaagagttcgatacctccaacactaacaagtatcctggcggcgcggctactggtaacgtgagcgtgatcactgattgggtcgaattgccttgcattcaggatttaggcaaagacggcaacgaacagcagttctataactatcagtgcttgagcgacgagcgcgaacaatccgaacctacttacaagtcggcggtgacacttaactacacgtttgctcacgattacgataacgcgatctacccggttttgcgttcagcagacgccagcaagcaggcgaaagcgatgtacatgtatattccgcgagcttctgaggttcgctactggtctggaattgcatctttcgatgacattccatccacagcggttaacgagatggagacggtaacgcttaacattgcgcttaaaggtgctcacgtcttccttccggttgccgtgtaattaaatggcggggcttgtgcctcgcctttttttgtgcataatagcgaataacacaaaccaatcaggagttaacaaaatggctaaattcaaaattcaaatcggcggcaatctcccttctttcaagctgcctgtaaccttcacttgcccagacggcaaagaagcaaccatcaccatgaccgtaaaacaccgctccaccgatgagatgaaagacttctatgagagcgaagataaagcgccaaagggtaacgccgagtttatccgcttcatggctgaaggttgggatctggatgacgaattcagcgatgaaaacatttcctggctttgcgctcacttcccggcgttcgtcatggcactgccacaaacttacatggccgcgcttgcgggccaccgtgcaaaagtttaaggcgggctgtttatctcacgcttcagcctgagctaaccgatcgccagcttgcggagtacgggttaaggcgatcggactatgaagcagatcttgaaacgatatattttgatgaacagaccgcccaaagctggcagctattccaggccatgcaaacgcagtggcgaatcgggatgaatggcccgacggggcttgactataatacgttgcctatgctgttcgaattgtataaaatcgacaatcgagaagcggcattacttgacttgcagatcctagagggtgaatacctgaaggagatttacaagaaatcaaaataagcgcctacgggcgcttttttcatatgggggataaacatggctgataaagtagctgggttgacgtttggcgttgacgtttcgcaggttgacaaagctgtacgatcactcgcagaactgaaaaaccaaagccagcaaacgggcgctggcctacagtcacttgcggacgctgaaaggcgggccacggcacagaccgatgaaatgaaccgcgcgttgcagcgccagaagcaagagacagataaatcaaaaaccagctttagcaggatcgcaagcgccatcgatcccacgatctcaaaaatggccaacttgcgcaaagcgacggaagaacttgataaagcatgggctttggggcttgttccagataaggaatttttccgcctgggcgctatcattgaatcaacaaccaaccaactccggcggcagcaggcggcgctaaccgaagaaggtcgcgcagcaatcgcagaggcggaggcaaagcagaaggcggcaaacgccgggcgtgattttgtcgccagcctgaaacagcaggctgactccattgggaaaacacgcgccgaactgctggaaatgaaggcggcgcaattgggtgtatctgcggaggcggccccgttcattaacgcgctgaaacagcaagagcaggcgttaaagaaacagcaaaacgctatgggcctggctggcatttctgccgggcaatataaaatggccatgcgccagttaccgatgcagatcactgacattgtaacgtcgctcgcttcaggtatgccaatctggctggttgcggtgcagcagggcgggcaaatcaaggatagcttcggcggcttgagcaatacgtttaaggtgttgttgagctacatcaacccgctaacggttggtgctgcgtcgttgggtatcgcgctggcagcaatcgctaaagctggttatgactcctggaaagcgcaacgagaactggcgaatgcgctggtgctgactggtggctatgctgcgaccaccaccgggcagatcacagccttaaccgaagagattaacaaaaactcatcggccacgattggcagcattcaggaaatcgcaacatcgctcgccagttctggtaagtacaccatcaaccagattaagcagatcacgaagactacggcggaatggtcggcgcagactggtgaaagcgagaagacgatcacagggtattttgatgccatcgtaaaagaccctgttaaggggcttgccgatctgaatgagcagtttaatttcctgaaggaagggcagctaacctacatcgaatctttgcgcaaaaccaaaggcgagacggcagcagcagatgcggcgacaaaactgtttgctgagacgatggataagcgccttaaagatatcgcggacagcgcaacgccactcgaaacaatgtggacggatatcaaaaaatgggcagctgactcatggaaatgggtaggcgatcacacggtaggggcgctaaaccttatcgttgacacggtgtccgcaatcatcaacacgatcagaaagctgattgccgacggcgacgccatgatcgcgcagttcatcgttgacgctggccgacaactacagaaaattcccggcatgggagacttcgggaatgactttctggcgcagcaggaacagttaatcaaggactcgaaagccaaatccgcagagcttgcaaaaaccatcgcggagcagcaagcaaggatcgctaaaggagagatggggtacattgacgccgcgaaggataaaaccctttccggtgggtacagcagcaaaacgaaggaacgcgtaaatcaggaagaaaaagatatcctgaaaaaccgcaacgccaggaagcagcaggtagacgcgggcgttaaaattgatgagcagtatcaggctgaactgctatcgctacaggcgcagctaaaggttttgcagcagcacaaagggcttgacgacaagatcagccagcagcgcaaagactacttcgagacggttgctaaattccaggttttggaagaggcaagccagaagcgaaaactgacccaaagcgaacagcagatgctggcgaacaaaaagaatatcctgtacatggcagagcaaaaggccattgtgggagatcagattgttcagcagcagcgactgaacgccttgcttgacaagtcgaccaagtatcaaaaccagatggcggagaaaaccaaagcgctacaggataccgccggaatgggtagcaaggagcaggagagataccgggccaatgcgcagatggcggctgactggaaaaacagcggcggatctttaagtgaccctggatttaaagcgatgcaggccgcaagcgataaattctacgcacagcaagatgcgcaaatgatgaactggaaggccgggttcactcatgcgtgggctgacattggcgacgaagttaacaacgtatacggcaacatcggggatatcaccaaaaacgcatttagcggaatggcgagcgtgctgactgattttgtcatgactggtaaggccagctttagcgactttgcaaagagcgtgatcactgacattaccaacatgcttatcaagatggcgctgtttaactcgctttctgccgcgtttggtggtggtggcacgttcagcttcgccaacatgttcagtaagggattttccggcggtggttacactggcgacggcgggaagtatgagccaaaaggcgttgttcacggcggtgaattcgtgttcacgaaggaggcgacgcaaaggttaggcccggaaaacctataccgactaatgcgcggctatgcaagtggcggcctggttgggggtaacgcaagttcaggatctggaatcaccaacggcggcaacgtcgcggcgtctgcggctatggtgtttaccattggtgatattaacatcacgatgggttccggtcaggatagcaaggggttagagcagggcgtaaggcagatcgtcaacgatatgttcaccgaggcattgagccaaaacgggcgcattgcgaagttcgtcaatgagaaaacgaggaggtagtagtggattcctttaaatggtgcacacaaattcaaggaggggcggcaaaggtcgccatctccaacaacattcgatcgattggtttcggaaacggctacatccaaacggcatcgagcggaattaacacaaagcgtaggacggttccgatcgtttatggcggttcagattgggaggaggtttataacttctgtcaggatcacgtaacaaagccttttgtgtggaaggcaccggatggaagaatgggcgtattcgtcgtaactgccgactccgttaaccttgcgccgcagggtggcggggtgtttgaggtaacggctgaattcgccgaacgcttcacttcagccggataatcaaaaagcgccctttacgggtgcttttttttggcctatgatctgtagtcaattagaggagggcttacgatgacagccaatgtttcaaaagagtttgcgaactgcttacaaaaacttttcccaggcgagatcctaacgctgatcgatatcgacgccacaaagttcggcgggcaggtctaccgattccataacgagaacgtcgcctatacaaccgaggagcttttggcagcggttaacggcgggacgcttcagccaaagatgataacgtttcgcggcgagcagtacggcccgcgcccgttcggcctgggcgggatcgcaatgtcgagcgatggcacagtggaaaagccaacgctgacggttagcaatatcgatgcgcaagcgagtgctcttattcgtgcctacaacggcctcatgcaagccaaagttacggtatgggttttggtcaaggatttgttaaacgtcgacggcagcgttaaagacggcgattttaggcgattcatttactacatcgagcgccccaaacaggtcgacccgcaaaaggcaacgttcgaattaacatccgtgtttgatatggacggattaatgatcccggcacgcctaacgcaaaccgtttgctattgggcgcagcgtgggtggtacaagtctggcaaaggctgcgactacaacgggcagaacggatatttcgacaagttaggaaacagggttgacgatccgtcgcgggatgtttgcggtggcctggtgtcttcttgcaggcttcgttttggtaatgaaccgttgagtttcggcggttgtgcgacagcaactttgaagagtggtggctaatatgttgactccgaaaattaaaatgcagatcatgcagcacgcgaaggaagtctacccgcacgaatgcgccgggctggtaacgcaaaaatcacgcgtgcagaaatatcaccgactagacaacgtttctccagatcctgagaacgaatcaatgccggatgaaacgcagtatgcgatggcggcaatggatggcgagccgatcgccttcgttcactcccacactggcgacggggcaaccaccgttccgagcgccactgatttatgcttctgtgatgagtctggcttgtcgtgggttatcgtctccatcccggaaggcgatatgcgaatcattgagccgaagcgccgcccgctgattggtcgcccctgggctttgggcgcttatgattgctatggcctaatcatggattttcacaagcgctacggcgtcacgctaaaagatcggcgggttccgttcgaatggtggaagccggaatacaaagagaatctttaccaggactactggcaagaggacgggttcattgaaaacactggcgagcctgaagttggcgatatgatcatttttcagcttcaggcggagaagtggaatcacgcggggatttacgttggaaataacaacatccttcatcacgcatatggcaagctgtctcgcagggatatctattctggatggtacgagcagcacaaggttttaatttgcaggcataaggagctaaaacatggcatcacatacaaagacgattaaactatctggttccctgggccgtcggttcggtgtcttccacaaacttgcggttgattcagtcgctgagtgtatccgggcgctgtcttaccaggttgaagggtttaagccgttcatgcagagcaaagttggttcaaacatgcgcttcggcatcatcgcggacggaaaaccaatcagcacggatgactttgctactttctccgtggcaagggagattagaatcatcccgatcccaagagccagaaagaacggagggttgttgcaggtcgttatcggagcggcgattatggttgcggccttctttactggtggcggctcgctggcggctatgggcgctttttcatctgctgcatttatggctggtggctcaatggttttgggtggcgtaatgcagatgatcgcaccgcagatgggcggcaacatgcgggcgagcgaatcacctgagaataaaccatcgtatgcgttcggcgggccgattaatacaacggcggcgggttatccaatccagttgccatatggttacagattggctggcggtgcattgttcggttctggatcttacgcagaagacaacaactaattaagccattcgctttttagcctgggggcgtagcctccgggctttttgtcgtgtacaattgcgatactattaacaggaggctaaacgatgactaatatcaaggcccgcaagggcggttcaagcaagccacgcactcccgtagaaatgccagataacctgatctcaaaagataagatcaagttgttgcttgctgtttcagatggcgaggtggttaacgacttcagcctgaagcagttgcattttggcggcgtcccggttcagaacgaggatggaacattcaactatgagggcgtgattgcagagttccgccccggcacgcaaacgcaggactacattcagggcttcagcgagtcaagtgctgaattccaggttgctcgtgaagtcactcacaacacgccttatacgcttaccgtatcgaacaaaaatctttctgctattcgctttcgcctgttatggccgcgcgtgctgactcaaaaagataacggcgatatggtcggatcggttgttgagtacaagatcgagatggcggtagatggtgcaagttatcagacctacctaactggcaagattgacggtaagaacacgactggcggttacgatcggagcattcgcgttaacctgccgcaaaactttacgtcgcaggtgcttatccgcgttagtcgagtaacgccggacgctgacggggtgaaagttgtcgacgctttccgggttgaatcctacgctgaagttattgatgcaaaattccgctacccgttaacggccatgctttacgttgagttcgatagcgatctgttccagaaccagatccccactatctcactcaaaaagaaatggaagattatccaggttccgagcaactacgatccgattaatcgcacgtactccggaaggtgggacggtgtttttaagtgggcgtggagcaataacccggcatgggtgctttatgacctgatcatgaatcagcgctatggtttagaccagcgcgaacttggcatcccggttgacaagtggtcgctgtatgaggtggcgcaatattgtgatgaacttgttccggacaatcgcggcgggatggaaccgcgctatttaatggatgtaattgttcagtcgcaggttgaggcgttccagttggtaagggatatttgttccgcattccgtggaatgacgttctacaacggtgaaagcctatcgatcatcgtcgataagccgcgcgatcctgtgtacctgtttacggctgataacgtcgttgatggcgttttcgttcggacgttcccaagcgaaaagacgatgtatacgtcgtgcaacgtcatgttcgacgacgaagaaaaccagtacgaacaggatgttgaaccagtgttcaacccggacgcagccatgcgatttggccacaaccctaccagcattacagcgatcggatgcaccagaaggacggaggcgaaccgccgtgggcgttggattctgcaaacgaacctaagcgccacaaccgtttcgttttctactggtctggaaggtatgattccttcttgcggcgatgtaatttacgttgcagatccgcactggcaatcggcctttaacctggtgctatcaggacgcgttatggaagtgtctggcgtgcaggtgttcctggcctaccgctgcgacgcgaaggctggcgacactctgatcctgaataccgacgacggaaagcctgtgcgccgcacaatcgccagcgtttcggcggacggtaaaaccctaacgctaaacgtgggatttaattttgacgttgcgcctgacagtgtattcctgatcgagagcgatcagcttgcagcggaacagtatgtagtaaccaggattgaaaagggtagtgatgacgacgaattcacctttgccatcacggctacgcagtatgatccgaacaagtatgacgcgatcgacaatggggtaattaccgatggccgaccaacttcggttgtagacccggattcaatgggcgctccgaaagacttaacgattagctcgttttctcgcattgttcagggaatgagcgtcgagacgatggtgatcggctggtctgccgtgcagtatgcaaaactgtacgaggtgcaatggcgcaaagatggaggtaactggaacaacgttcctcgcactgcgacaacgcaggttgatattgaaggcatctatgctggcgagtatcaggcccgcgtgaggtgcattagcggagggaatgtagcgtctccgtggtctgcattggcaaccgccaaactgaccgggaaagtcggagcgccaaaaggcccgattaacctttttgcgtcggacaatgagatcttcggcattcgcgttaagtgggccatgccagaaggggcggaagacacggcatacattgagctttaccagtcgcaaagcggaaccgatcaggacgcaagcctgcttacactgattccttacccggcggctgaatactggcattcaattttgcccgctggctacgttaacttctataaggctcgaagcgtagaccggatcggcaacgtttcagaatggactgattacgctcgcggtatgtcttctactgacgttaacatcatcacagatgcgatcctggatgaaatcctggatagcgacgcgatgaaggagcttcaggaaaacgcacaggatagcgcggcaaaactcaatgactacgcgaacagcatcattcaaaacgctttggcgaatgatgcggacgtcagggttatgcgcaaggagaacggcaagcggaaggctgagatcgcgcatactaccgtgctgattgcgaatgagtctgaggcgagggcggctgaaattacgcagcttaaagcgcagattgatgaagatatcacgtcgcagatcacgacccttaacgaagccattgtaaacgagagcgaggcgcgagcgacgcagatcggccagttacgggcagattttgcggctgatattgacggcgtaaaaacaaccatgaacgctggttttacgcaggttaatcaggctattgcaaacgagagcgatgcgagggcaacatccgaggcggcactagatgccaaaatcgggcagaactccgcagcgctaaatcagaaactcgactcgtgggcaaacgttaatggcgtcggttccatgtacacgatgaagttaggattgacgtacaacggacaggaatacaattccgggatggccctacagcttacaacgcgtggtagtagtgttgtttcgcaggtactgttcattgctgatagatttgctatcatccgtaatgcagcgtcgggatcttacacgttgccgttcgttgtacagaatgaccaggtgttcatgaataacgcgctgattcaggatggctcaatcaccaacgctaagatcggtaacgtcattcagtcaaacaactacatcgccgggcagcaagggtggatgattaacaagaatggtggttctgaattcaataacgttgttgttcgtggcgcactgtttgctgcgtctggtaaattcggatttgatggcggaaacggtgtggtaatcaatggtaatggtgtcacggttaacttagacggtggcgggcgaattgttttagggaggttctaatatggcaagcggtttactaatcgatcttaatgatggtaatccggtgatgcaaattacggcgggtatgcgttgcccgtctttttgcaacctggtaagtaacacgtgggatgaaaaaatagtcaatattgatggctacgttcctggatctcaaattgtcgttatccctcgcgatcctgtatcaatccaaaataggggtacaaaccttgtaccaactatcgggatgcaaagtggttactcgcagaacggatcgcaacttactttttctacgtggtggtctgataattgggggcgcgatcgactttatgatttaacaatctgtcaaatccttccctcatccacagggcaagggttgtttattgcagattccaccgactttaccgcaatccccgactcaacaagggccgggttttgcgtttgggccggaacgatcacgtttacagggcaatggcgaactccagataccggatacgaccgcaataagtatatggtgtttgctcgctggagcgccgacggcgtgacggtagaatatgacggaaacaacatctacgccaggaatgaaacgaacggcgaggagggcgacgctacggttacaatgagggtggctatttttgccagcggagttgctccacaggcgggaaccggattgaactttttcaacgcggctggccaatgcacattctccacggttcgccgtccgtttatcttcaggaaccgattctataacccgtcgtgggattatcaggatatcggcgagggaatgattttgcttggcaggtatggattcagaagccgggtaagtggtgatcggtgcagggcaaaatttgccgggttaatgatgagcggtaacagcgtaagatgtgccagcggcatcacaaaatctaactggacgtcaagatatagcgtcgtccaggatcgattggtcggcatgagcgttcccatcattgaaaacatgtattaaaagaaaaggggccatgcggcccctttttttacatccctaatttatcctcaagtgcggataaccgcgcttcaaatccttttgcgataaaaaggttcaactcctcaaggcggaacgaataacggtcgccagccgggatggttttgtagatcgggttttcggttccgtcttcatttgctggcccgtattctgaaacaaccgtgtgttcatcccacttgtcataacagataaagccatatttgaacggctcaagcccaaaactttccatgatctcgatcgctcgctgaacggtcaaaccgcagtgctcgcgcacgtcgttcatgtcggcttgctctttccacgtccagaacccaatctccttcgcaatggcttttgccgcttctgtttcaggatcgctcatggccctaacgtcattcttcaacctggcgtcggaggtgttgattgacccgttgacggcgtacatttgcttaaccctaacagtcgccccaccaatatcaacggagttatcggtggccggagcaaatgcaccgctagcgccgattctccataccgccctcctagcattcgacccaacagcggttgtctcgaaagagatatcagttggtgtattgttcgtaccccaaccctgaacggcactaaatgaaattgcaaccctcatggagccgaacttctcgccatcatgaccagacgcaccaacatagaaagatgagccagcctgagttgcaccaacgcttcttgaggttcctgaaagattgccatcgcaccacatggcacgaatagctggtgctgatgttaacccggctcgcggcgcgatcatgttaatttctggcgctggagaaccaacaagtttcaacccgcgtccatcttggttggttggagcgttaaaagtaggaacagcagcgttcaacgtttcaatgctacgcacaagcccaagatccgggtgcataacgccgtccggaaccagccaaagatctccattatccgacagcctgaacgcaggaatcctatcgctaatagtcttacctttaggggtgacaagtaagcgaatccagcctccgtgattggttccagatgtatcgccagcgcccaagaaatgcaacgccgcgttactgtgctccgtgtattcagatcctaaccacgggcgagaaccataaccacctaaaagctgattgttttttgttacgctattggacgcccctcgcgcatagttatggaacacggcggaaccgccagcagtattctcaatcccgaaagagcattcagttgcgttgtcgccgataaagttaacgccaactccagttgtcgcggtcgtctccttcagtggcaatttctgcgacgcggtaacatcaacaccgccgcgaaggttggatgcaccattgacgcggagcgtgcttaacatcgtaaccgcattgctgaaagtggcattcaacccggtaacggtaaagtttgccgcatcaaaaacaacctgcttcgcgctgttaatatcgccattcgggcggaagtacatgcctttaccgtcttccgggatggagtaaacgatctcgttgttgttattggcccgaactacggcaccgttcagggttagcgtagcgttaccaccagggacggagatcgcttgtggtttactgaacgtgttagctacgttggtgcgtgggatcgtgctatcgttagccatcaaataatcagatggtgaattatatacaatcccggctggctccgtggtaatccacgaataaccagtgcgatcgataatcggccctgtaatatatgagtttacggcctggatgtttacgcgattcagccacaggttaggaatccatccactcggagcatgtagataaacatcaaatgagaagtctgcgttcttcactaccccaagattaatgcgcggagcatttggccttgccgcaaccaaagagcgctgcgtaaaccaagtgtcaatattatcgcttgtcaaaggtgaagctggaaggccacgcccagaaagcgaaaagatatcaaccgggacgtttgcggatccataaccagaacctccgccgacgataaactgagcaaaagcgtaagacgaaccggcgctcttaatattggcgatcttcatccatgcccgcgagccgcctggcgaagtaggcagcttatccggcgcttgaacgccagtcacaagatcgacagtctggttatagaggttttctgtctggctctttgctgtttgggcgtcattcttcgcggagttggctgcgttctctgaagcctttgcgttcgtttctgaagttttcgccgcaccttctgacgcagcagccgccgcagcgctcgcgtccgccgcttcggaatctgccctcacctgatcggcaagactttgcagagcttcgaaatcgaagttcttaaagaagtcgacagcatccgcaatttgagtttcctgcgactggtagtagcgcagagtttccgcaacatcttgcgccagtccgtcaacggtcagcgagtcgcttaacaggatcgcgtagtcagtagacgctacgacagcgccttttgtggtgatggctttaatttctgtatcgctaaccaccttgtttactacggccatttgaatcggtgacgacaaaaacataatcgtcgcgccggggcgaatcagcgaaagcgatgattgccactttgtgccagtcccggtaacagttccgtctgcggccatagccgccttgccttctctgtatagtgccattttaaaagcctcttatgttggttgagtaacgcagataatagcatcaatgaaccgataaaaaaaggagcctttcggctcctttagttgtcaaattagaacgggatatcgtcatcgaaatccatccccggattcccgccgctgttttgcggtttaggcgcttgctgcggcttgggttgttggggttggccccacccggattgctgattgccgcagccgctttgcgaaggctcgcgctggctgaattcgagttgtggcataatcatttcattgtggctgtaaattgtgccgttgtgctcgcggttcacgatctgaagcgtccgacaggttacgctgatcaccttatccatttgcagcgcttcgtcgtaccacttaatcatgttttcttttgcaaagaaaacggcgcggtagttcgtgtaaattgtttcgtcctcgccatcacgattgcggatcttcatccgctccgacaggtctacggcgtacattttccacgggccgttattgttgctgccctctttgacataaggcgcttttctgattacccctgttacaacatgcattgtcattcctatggggcggtttcccgcccggttaaattagttgaaagatgaaatatcttgcgcttctggttcgggctttgattctaccttttccggctcccgtttcgcaacctcttgcggcttaccaggattgaagccgtttgccggggtgactttcagttctgcctggcgtttggtgatatcgtcttccgtcattttccattccgcaggcgttaacgtttgtttcgccatcttatagatctcccgaagcgattcgagatcttcgcacgcgtcaatgcgttttttgaagtctttcggtgtcattttcgtaatttctgcatcatcatccgcctgcttgataccgagcgctgcggccagcgcataacggcgggcgtaagatgttgttgaaccatatgcttgctcgacggttttactgatcggcatattgtactgaaacgccatgaactcgccgctttcatgcaaaaacatagtttcgaggtgcatcaccttttcggtgctcgtatccatcatggattgaatgaccataattttgttcttctccagcgccggggaaatagcgtcgaggatatcaccaagattcgcataggtgttcccaagatggttattcttcccgcttttctttgcggccacgaagccagattttgccttgattaatgcggctgcgatggtggtaaatttttcagatgtacgcatgataaagtttccttttcctgattggtaatgcgcactatatcacaagtgcgcaccagtgtttagctatttgtgccgtatacgtccgggaacatgtatttcacaaactgcggagtaggcaaaacaacttccgccgcgtttgactcatatgatggccatgaatcgtgcttcacgcattccgcatactgatgaatcacgctttgatactgcttgcgaccgatctcgatctgctggctggtcagggtgaacgccagcggagcaaacggtgattttttctcctgcgttagcagtctgacaactaccgggcgtttttcgttgtaggtcttcacgaacagatcacgctgcaatgccatcttgagatagtatcccaaattgaaagcgagtcgcccgaaatcgtcaggcttggaagattgcgtggttttgtagtcggtaatcaccactacctcgaaaacctcatccgggttaaacccccactctttgatgagttccggatcggaaaccacgtcaacatgatcgagtcgaaccttaaccttgacgccgaagatctcaccgaagattgacaattcacgctgtgcggttggcgattcgatacaggcggcgtgtcgcgggttggccagcatcacgctgcgcatttgaacaacggcatcgaaatcaacatccttaaccagcttgcgcccggagttcatcgcggcgctttcgtcgcacagttcaatggcccaccaaacatttacgtcaatcccggcgcggtatgccatctccagaagttccgggtaatccttgttggacgtcccaatcaggccacacgctttcagcttcgcagacagtgccgacttcgacgtaatcagatctttaacctcacccggagaagtcgcccgcaggtactcgccattaaattttgccgtctcaagcatacatgtatgcgaacaggttccgaacgccagcgcggcggtttcctcacgcaccttgaatttccagtgcgccggggatgttgcgtaaatctcgccgaggcttgagccgctaacgtactccgcgcaccatgagttaggatcgtgatattgctcgttagtcaattcactgctggtgtatgccctgaaaattgcttcagccattgatattgctccatttgtggtttcgttgcgttaagtatacgcatgacgattcccggcgcaagtcaaaaagtgctatccgcagttggtcaaaaaatgagcgaaatttacgtaagatttagtaagatgcatcttacgtgattttttctatatatttcattgagttaatgcaaatcggtaagatggtaagatccctataggtaaatatccatgaaaaatatggcgcgaaatccagcgaaaaaagacacgtaccccggagaaatcttaccaagataagtatagagagatagagtaataataataatattattatttatcatatacttactatctatatatggcgggtaattggttaaattttgcgcgaaatttacgtaagattcatcttactaaatcttacctaaagtggttagaccagttgcaagccactgaatttcaggcataaaaaaaggtaagactgattttctcaatcttacctaaattctggtcaatatttaatcagagaagagatgatgccttgtataacttacgctcaaagccgagcttaaagttgtcaccgttcggaacgataactttaagatcccgatcgtcagcagccgccagcatatcccgatctccacgacggcaaactacccgcatttctcgcttatcttctccgcccttgcctttatacctgtacgccacgatctcgacattggaagggatgatgcaggcccaaacgtcgcacttgaacgaactggcaatattgaagtgcatagcctcaatccaggatcgagcaaggtaaatcggcccgttaccgtcgtcgctctgattggtcactatcaccgatccgaaggtcagatcgccagctaacatcttctcgcgcccctcctcatcaatgaacagcatgttgcaatactcataatccggcccatcctcatgcacgagttgcattggtagcgcgtgaattagctccttcctgccgttctcgtgggtttttatgcctacctgatatgatttgatatgttcgttttcgatgccctcataaagcgttacaggcgtgctatcgacggcctccgttctgtttagaactgccagcactctttcatggtcggccatcttgccgtagtcatacccgttatcacgagttacctgcttgtttctcttgatcacgtattcttgcggaacctttccgagatagcgcccaagaatgttgatgcattcactatacggctggccgcttaacttcatcaaccagccgatccccttatcagcgccgcatccgccgcagtatgcgccgccgtcgccgcgcgtttctaacttatcagtccagcggaatcggtctttgccgccgcagttcggacagtcctggtgttttccgttgaagtatcgagagtgaacaccgcaaatgttctgcaacgcttcgcgccacatgccagccatgtacggcaaaacctctttttcatcgtaaaaatccacgtcgtaacctccaaataaaaaacgcctacacgagaatcataacccggcaggcgtttagtgtttagacaaattgtgctatcggactacgcggagcatttcgcggcggtcgcatctgcgcgtcactggcttgccgttgctgtcaaatcttaaatctggtcggcagaatgaggcgcggaaacctttgcaattgttccgtcggtagctcttatgcacgagataagcgccatcggctgagatcatgccgcgcttacgccactgctgaacaacctggatgctaacccccaactcttttgccgttcccgctataccaccgaaggcatcaataaccagctccatccgcgcagtcaacccggcgcgaacctcatctttcagcacgtagtaaccagtcggtcgcttgcgtttcttcttgtctttcccgcgcgatgttccgttgttgccgttcaaggttcgcttatccacctttgccatttgttccataatttaaccctcatagcattttttgttaaacctgataaaatgttccatgtattatacacgcaactatgcgaatgacaaattaggattgcccatgctcacaattgaacaacaaattgaagcctacgcagataagatcccgttaatacaaaagcggttcaccgtcggaaatatcgttccttacccttatcaggcggttgcgtatattgagaccgcgaagcggatcgcaaaatatgaacatccgttttacattaaggcttcggtttccgccgggaaaaccatcatgatcgccatgctcgcggcgcagtgcaaagcaatgaacctgccaatgatggttctcgctcgccaggctgagatcgtgaagcaggattccgaggagatcagtaacctcgatgttcccaactccgtttattgcgccgggttaggcacgaaggcggcatacttcccgatcgtcgtcggatctgaagggacggtggttaatggcctgtttaaaatgctgggcgactacgtgccttcagttctggccattgacgaatgccaccaggttgactggcaagatttggcggaggcgatcgccaacaatgaatcgttcgagtacatgagccgaccgaaggataagccgtatcgcgtgaacggggaacttgtcgatgccgactaccaatacgacgaaaaattcgacgacgtagaattcggcggcggtcgcacgcagtacacgatcgtcatttgcgagttaatgcggaggtgccttgagaagacagggcgagaacttcgcatcgtcggttatactggttcggagtttcgcggggtgattcccatcttgcaggaagacaagacgcagcctggattctggcgtgagcagatcaccgacattaacacaaactatcttgtcgagttcggatcggtcgttcccaccattttcggcgataccgaggcagatgggttgggttatgatctttcagaattccacggctccagtcaggacggtacgcaggattttagcgcggaagaattgcgcaagatggaaaagaaaatccatgaatccggcgaaatgacgaagctgatcatgcaaaaggtcgtggagcgtgcgaaaacccgaaacggcgttctgataacttgcgctggccagcggcattgcaaggaggcggcgagctatctaccgccggacgcaacatacgcgatcatcaccgagaagacgaactcaaagaaacgcggcgagattttggataaggcgaatcgcggtgagatcaaatacatcttccaggtgatggcccttaccactggcgttaacgttccgttttgggatttttcggtgatattgcgcaagatcgggtcgcttacgttgcttattcagcttttggggcgcggtatgcgactcctgaaggactggcaaaaacagccaccttactcgtgggtgaaggaagaccatttggtttgggacttcgccgggactatggacgatttgggccagctatatttcgatccgattcttgagcaggcgcaataccaaagacgcaagagcagcaagaacggcccgaaaatttgcccggtatgcaagggagaaaatagcgagtacgcccgccgatgcatccacaaagacagcaacggtaatcgttgcgaatacttctggatctcgcagcgctgcgaagaccagaaagacccgcgaacaggtaagattaaggtaaaagggtgttacgctgaaaacgatattgttgctcgccagtgcagatgctgcggggtgcagcttaaagatcccaacgacaatctcaccgggaagcactatacgcaaaatgactggtatgatgttgtcgggttcgatatagggttgactcgcaaccagtccgggatcatcttcaattacgtgttactgaaccatgacggcgagcgattcacagcaagggaaaagttcttcccggaatcagagaatcagatttgcggcaagttgtggcggcaaaaggcagtcttccagcacgttaacgacgcggtaatgcgcggcaagctgggcggaatgaagaatgcgcgaaaaatccttgagaatgcgcattacttccgagcgccgaagcgcgtaactcatcgcgttaacggaaagaaggaagatattatttcacgcaaagattttggagacgaatagtgattactgataaaggtgattatctcgaatactacggcgggcctgtgaaggcctgtccgcttgagaaaatcgatcagatgaatagcgtttcgtggctgcgtcacgaataccctgattatctgttctggcatacggttaacgaagggagtaagcacaaggcgagcgcggttatcgatcatcaaatggggttgctgaagggcgttagcgacattctgatcctgattgggttcggcggcaaatacccgttcgcggccatcgagctaaaacgccagggtaaggcgcaggcgtcgccagtgagcaaggagcaaagggaattccttgctgccgtccggcgtcgcggcggattcgccgcagtggcctatggcttcgagcaattcaagatcgctttctgcgatgccatcaaatagcactttttgttaaaactacccgacgcgagtcgggtaatattctcccatcgaaacgaatcacggagaaacatcatgaaaactttattagtcgcaattgtagctgtaatcactttgtccggttgcacttcatcaccccgccccgatggctggtgcgcaacctcaacgcatggaatctgtgttgccaaatggaaaaacggcgtagttgttccggctggtgaagtagatgtgcgcttcgctggccttgagaagaacggtaacgagatcagcggaaccgtaaccaccacaggtaaggaatggtaaaatggcaaaagacacccaagataaagacactcacgacgcgttcacgacgtttgaacagcttgaacgtgaaacgttcataggcaacgcgcttgccactggcggacactatcaggctgtcaggcccgacaggttttaccaggtaacaggcaaccgatacgccggaagcaaaacgcctgatatcgtgcgcgataagtgggcgaccgatcgcagtctgatcgcgtacatggaagagcgctatggcccttatgatcttgacgcagccgcagaccaaagcaacgcagtttgcccgaagttctacgacgaaaaaacggattgtcttaaacgctggttgggtaaaaacaagcacgtttggctgaatccgccttactcgtttccagacccgtttattctcaaggctattgagcaaatggagcacgacaaccagatcgacattctgctacccggcgacaattctactgcctggttccgtgacgcgcagaagatggccgccgagattatctggattgttgccgatgttgaagaggatgatgacgggaaccagttaagccgatccggtcgcctcgccttcatcaatggattaagcgggaagccagtcgacaacaacaataaaggaagtgttattttcatcatgcgcaagctcaagccgggagaggagcaaaagacgctttacattccggtaagcgagatttgcccgtcattagctaaaaagcgtatgcgcaaacgtggggtttaaaatggaacagatcgagtcttttgctgaatatcttcgaatcgttgttgagttgcttaataaatatggcttcatcggaacagacgaggagaagttagcctttgcggatactattgacggaacttacattgagttcatggataacggaatcccaatggctgactggccagcaatccttgaacgcgagctactggaattcaggtcgcacgaaggcgcggagtatttcgcaaaacagcactaattgctaaacaatacccgccgcgtgcgggtattattaccccatcaaccaatcaggagctaacgccatgaaaaccaaaaccatcgcagacaccatcaagatcgtaccagcgaaagcgcaagttgtatctcgccacctggttaacctttctcgcctgtgcatggccgactacacggcgaacccttcagataatggccttgatggtgttgtcggtgagatttattttcgcgccgggtacggccttgaaagcgtggccatgtatgagcaaatggccgaaggtttttgcatttacggtgacgaatgatgattgtcgagactggtcgcgctgccgtatggcagcacgcaaaagaagctggaataagtgatgatatcgtgaagatcgcaaagtatttcgatatcaaagatatatcaattatttttggtgggaagctcacctatctacacgagcgcccggtgaagcgcacgcgaatagcagtggcaacgcgagcggaggcagacgcgctgaagatgttcatccacgagtctaagcagcagaaaaaatattacaagtagcgggggcgtgaagaatgcgatatattgcgatcctatttacggcgatcctgttcacgatcgcaatcatgaactacgcaattcaattaggataaattatgttaccgaaaatcacagacgaagaatttttagccgcccgcgaggaaggtaagacctaccgcgagatcgcggaagagttcggcatgaacattcgaagcgttgaacgtcgcggcgttcgcctggcacgacaaggacacctacacggaaacgcccacgttgcgaagcatatcccggacggcttcggcgtcaaaggcacgtcgacgatgattcgcgcggacggctccgaggtcgttcggtgggtcaagtcggaagtagaccgcgatcgcatggtcgcgcttatggaggcggcgcaggctgctttctgcgaagaccttccgcgagccgaaccgcaaccgctggatgagtcgaagttctacattgaagatcagcttgccctgtacccaatcttcgacctgcatattggggctatggcgcataagcatgaatgcggcgagaactatgataccagcacggcagagaaggttctaaaccgcttctttgattattccgtgtcggtggctccgcaatcccaaaaggctgttttgctggttggtggtgacttccttcacagcgacggcctggacgcagtaaccccggcaagtggtcacgttctcgatcaggacagccgatacgcaaaacttgtttatgttgccattcgttccctgcgtcgcgccgtgtcgctactgcttaacaatcatgcagaagttgaagtgcaggtgattgaaggcaaccacgaccaggccgggatgatttggctacgcgcggcgctggcggcgttctatgagaatgaacctcgcgttttcgttgatgttagtccggcgatcctgcatcgcaccttgtggggcaaaaccatgctgggctacacgcatggccacacgatgaaaaagccggaaacgcgccttgctgcgatggctaccgacttccgtaaggagttcggccagtgcgactacatttacacgcattccggccactggcatcaccagactgtaacggaacactcgttaggaattgacgaagtgcatggccagttaggcgcaaaagatgcctacgccgcacgcggcggatggcgttcataccgccaggctgcggtgattctgtacagcaaagaatatggcgaagtaggccgctttatctaccgcccgaacatgtaaccacaacggccccgcgaggggccaacaaggaaaaccgatgaatagaaatatctgcattttcgatctcgatggcacgctttccgacggaacccaccgcttgcacctgctgccgaaaaaagatctccaccttacagaaagttggagcgaatttaatggcgcctcaattggagacagcccaatccaaagcactattgacgtggcgaatgcgctttatcgatccggaatgaccgttatcatcctgactggccgatccgatgaggtgaagaccgaaacaatgatttggcttgaccgctacggggtgaaatatgacagtctaatcatgcgccgcgccagcgataaccgtaaagacacggtaatcaaggaggaggagttacgcaaaatcggacttgatcgcattgttgcggcatgggatgattcccccaatgttattgcgcacttgcgcagcctgggcattactacttaccaggtctgcgactacggcgacaatcttcacgagcacttgaaatctcacggagtagacaaatgaaaaatgtaattatcctcaacggagcgcctggcatcggaaaggacactatcgcggaaatcatctcgcggaagtggcaatacaagaaccttagcttcaaacagccgatgtttgccattgctcgtgctgtgctgggatctactgattttgcacgctttactgcccgataccacgaccgcaagcacaaagaagtgaaatgcgattttttgggcgaccgttctcctcgtgaattcatgattcacattagcgaaaatttcgtcaagccgaccctgggcaaaagccagttcggcaagttgctttgcgattcagcgctaacctcgccgtttaactgcatcgtcagcgacggcggcttcgatgaggaggtggaacacgtagcagcgcatgaggcgcttaacgtatttgtcgtccgccttcatcgtgacggcatgacctttgagggtgatagccgcaagcatattcgacgcccggatcttatttgctacacttaccatgaactcgattttgatatgaccactggcgagccggaagacgacgcgcaaaaacttgatatggtttcggatgttgcattaaaattataaagttaatgcctttattatcaccaccttaacgattgggaaccttgatgggttcccttttttttgttcttaatttggcctaatgcatatatcatcaccttaccatttaactaacagaggttgcatatcatgcgtgaattcatcaacgcggcaaccaatagcagcggtggcgttgccctcgcgggatctgcaaccgggcaattaatcgtcgctgtcattggtttatttttcatgatcttatttggttcaatcggcacgtggctgaagtggaaagactccaaagccatcagggaggcgattgattctggcgacattaaagaggcattgaggatcaggagcaaataaaatgggaatgaaaactcggcttactttcgcggcggcgacggcgatcgcggtcgcgttcctcccaaaagtggaggacacgaaatacacggtttataccgatatcgctggcgttccaactgtatgcgaaggcatcacaggcccggacgttatcaaggggaaaacctatacccggtcagagtgcgacgcgcttttaaccaagcatatccaggtggcaaagcgaaccgttgacagcaaaatcaaagtcgatgttccggacaccttcagggcgtcgatgtacagctttacgttcaacgctggcggcggcgcatattctggcagcaccatgctgaaattaacgaaccagggccgattgcgcgaggcgtgcgagcagctatatcgctggacgtactaccgcaacccgaaaacgggaaagatggagaagtcgaaaggcttgtataatcgccgggttcaggaatatcaactatgcattaaggatctgaaatgagcacattaaactttcaacgagcgctggccatcggctttatcgtatgggcggctgccgtcgtttccggttgtgcatcaagcgtcccaatactttccgatctggttggtagcaagccggatatgacggcgcaagtcggcgcggagaacgtgaaacaagcggttggcgtgaccaacaaaacggacacgtcgagcaagcaggagaccacgtttaaggagtcggctgtgggtaaggttgacacgtcgaacaagaaatctgtaacgacctccagcattcacgccaaccagattacggcggacaagatcgagatccggaatgatgaaagcggaagcctgattccgtggctgattggtggaattgcggtagttatgctttatgctggcgaactgattttttcgtctttggcaagaaagaaaaacaaaggggcgtaatgcccctttttctatatgtaccgcttgacgtgcaatagcgctactccatcttcatcgttaaggccatgttcaaccgtgttggttgcggccattccttgatagagcaagatgagcgcggcacgcaagtaattttctggtgtgatctgtttcacgcaaacaagcctgtgaacttccgttatcagatcttccacctggtttcccgaaaagctgttcatcactgagttggtcaaggtgcatcatctcccacatatatctgttatccatcccttcgaacgacctgaaatcaaaacctatctccctgttatccggccccgtacaccacacaacgccgttttttccgtcaaggtatccattcgtatagcttcgcgccaaaaactccttagagaccattgaggctaacatacgttgcgacacgttggcggcttttgccaggcgaggcgcttcgcggtgcatgtagacgaacttcgcaaaatcctgccgggtgaattcccggcgagattcgcagaacttgtaaatgtcaagaatgaacatcaattacctcatgaacgacgggttgataaagacttcggaatccatcacgcagataaagcctaattcctccatcttcggcaataagcgttccttaatctttttgctcaccccagcctggcctttgaagatcttcaggttgcggcaggcgttataaatgccctggacggtaataacaccttttgcctgcttgcaacgactggcgataacgtcatacagcgctttaatttccgctccctcaccagcaaagccggaagagtcagccgacgacaaatacgttttgctcaattcatggaacatgatgatcgcttcgtcaatggtcgccgtgtcgatcttcttcgagcgctccccgccgggttgccagttccggatcgtgtgaatcacggacgccagacgcataacctgcttatcaaacttacccatcgcgccgcgaagcattgtatgcgaatacttaccgccgtcgcctagctccggttctaactcctggcgtgccttattcagtctccgcattgccgcgtcagtaacctgcaacttaatgttcgattcgctcataatgtcatgaatcagccggaagtaatccgccttcagtgactggtcgatcggctcataggtcgaattcccgttttcgtcgatgaacacgcgttcccccaaacgggtttgctcacgaaccagaaggaaacgttccgagacaccgatcccgcgagaaccagcttgcatgatggcgtcgatggtctcatcctgtgcgattacgcaaatgcagcccaaagcctcgaatgacatattgttgctaacgtcggcacgagcgatcgatacgtgacccttatcccatgctttgagcaccagttcgctgttagtcttctttccgccatcgttgccatacgtgatccccaaaaggctgttaaccgccgtcgcctcatcggaaataacggcaaagtttccctggcggttgttaatcttcgccagaccttccggggtggtatcggataccgggaaagttagatcacataatttttcaagtttctcttccagttcgtcacgatcttcgaaaagtttcaccatatcagattgcgacaactcccctttaagcgcctgcttgttggcggacaacttcgccatgattttcttacgctctttcttgcgtaactcgttaatgcgttcgacttcggcgacaatgggatcgatggccagcgagttaatggcagacttaccagcggaaggcggctgcgacgtgataacgtaaagcgttgtcggttgctcgctgccgtggtactcgacccaaaagcggcccatcattgcggcggatacggttccgagaaagtgcatgtaagcggatgattccgggaactgaacagaacgcgctgcattgagcgccagcttgccgaccacatcgtaatcattggcgatcgagattgttggatacttatccgcgtttacgtcgatatctttgggctttggccagaatgaaacggagtcacgatacccgttcgcacgaatcgcaacacgcagggggctgatcccctccctttctgcgatggcgataatatcttgcggtgatacgcggtcatttaaaaacatgcccttgctcctgattggttaatcgttcggctaatcatatgccgtattaaatccgagatccagtgataatctaaacacgcttgaaaaacgcgcttggattatcggggcgcacggccccgaaccagtcacaggtatttagcttcgaaagtcgttccgtccgatacactgaagccaactccctcgcggtacagcgtccagcggcatccgtcacggtcgaagatgtatccagcaaccgcgccgagcgcacgaccgctttccacctggtagcgcttgccgacgctgaaggattttttcatcgggttgctatggtcaaggccgacgcattttagcgttttggttttgagttcgatgaacgtcgcaaccgccgctccgccgtcgccagcaataaacaactcgccgctaacgcctaccgacaaaataacgcgtttcttcttcagttcgatgctgtcatataccatcattgacacgttgccttcatcgtcgacgcgggcggaataaaggttgttttcattgatgttaacggcacggcttgacgtgcatttaatcttgattgacttcgccatttattttctttctcccatctcgatatacagattaaccagatccagaaagtcagctttatttctgcaactcaatttaaagccaacgtgcgactcaattttattttgcatcgcagccagggttgcgccgccattattcatcctgagaacttcgcggcatacttcggcgagtttttgagatatcatttcttcaccacctttatttctatgttctcgcaagcaattttaagatcattaatcaggcggttaagtcttaaatcggtcattacgtgatgatggcgaacatcaataatccccgcaacaactaacagcatgacggcaaagataaaaccaccaggcccggacatacacaaaatagttaacatcatcaagataataaatttcatttccgtttactccgttgcgtttctatggggtaatgctacccgactttcgccgggtagctttagcaattcgtgctattctcgataattcgcctggaacacggcgcgggcaaaacctcgcggagtaatggagcgcagcattttagtcctttctgaccttccgcccaaaaacttccaggcccaaaagaaattcacgccttctactccatccggcggcgggagccgtttcggttcgacaaaaccgtttccgtgccatatgcacgttttcttcgtgtaattgtcacagtggggcattttgggatgccacacaggttcgttcggagaaacatagccgccgaagtcgcgcgggtgaaaatagaagtcaggcttgcgccatagtgacgataatttcccgaccgggttttcgaccatccaggggcaaccatacttattgcctaattgctcgaccatcttcgcatcatctgcggctgatagaacgtcattatcttcccttacgtgcttgattccgctatgcgctaacagcgtgcatgatgggaaagcgaaaatgaagtcaggatcgggaacgccgagaatcgatcgcttcacgtcaaaatccttgtcaatccaaatgttaacatactggatattggggtgaaccattcgaatgctatattctccgtggtcgccggagtcggcattgaagcaatacaccttgcatccattgatggcccacggcaggcccatgatgcctgatccgtcgaacatgcagtaaataaccttgtctttcatgctttccacgcctcaatgaacattctgttcgattccagcgtcagcgtgacgccagccagggaggactgaatgaggcgaccgcccggaatcgtcccgatgatgtagcggcctttcgacttcgtgatcgtgatctgagtgaagccggaggcgcggttcatgcggagaacgacgcggccatgcgcgttcagtactgcgagaatggaatcagtcttcggatggttcattgtgtagctccttcgcttgttggtgtggggatagtatgccactatcccgccatgttgttttagcaaaacgtgctatgccggaacacaggtcgcgtaatcctggctgatgtagatcgtgcgctggacgcgaggttctttttcgccgagttcctgaatggtaacatcgttgcttcctacccggcacggaacagatccgaaaataaactcgccagtctgcttgtcgttgatttgccatacattaccaccttcctttttgacaaccaggaaaggcgcgctttctgcgctgaactattcctggccacgaccgtagtaatacgtgatcgcagctttggccgcagagctgaaggcgtcagtaacgtcattggtcgccttgtcgcggatggccttgatacgctcttccggcgatccgatgatgtaggaaaagctgttcgaaatggtaactgttctcattatattttaacctcgtttcgttgtacaaagtcggcgacgtaatggcattcgattgggttctcgatacccgcgagcacctcgcagcgaccgttattcagtagctggtaatgctggcactcagcaccgccaacactggcaatgacaatggcgatcccgttgcatgaaccgccgaacattcgatgagggaatgggtaagcatcacaggtgcaaaccacctcccaggcccgccgtttcctcatacctggcccctctcgatgcagaaaacccaatcacgagcgtcaaccgcaaagcgtgcaacgccgtcgagcaccacgaagacagtaaaccagttgacgccgcgacccttctcgatatcggttacggtacggaacagatcgcttgcgccatattgaattttatccccgacgactacatccgcaaatgctttcatggttaatctcctgactggtttcgatgggttaactataccaggcctttcggcccggcgtttagcaattcgtgcttatttcaccgctttctttgctgccttgtacacctctttgaaggccggaacatcttcgaccggaatccagaagccggagccatagccatcttcatagcaagggcattggtcgcagtagtcgccccaggttttctcttctccgccgacagagaagccagtggccatttcgcataacgcctcctcaaccgcctagatcttgtcggcgtcgctatccatgataacgaagttccacttgccgttatactcgctgcccaggttgattgattcgcgttgaagtttcatagctttagcccctttggctcaattcgtttcgttgaagtcatcatggcaaagtcgatcgggtggcttttgacaaaaaatgctattcctgcgattgctgattattcaaccgattcggaatagtggaatagtgagtgattgcacctgattcactggtgattagttttgacgaataatgattgcttttgattgtttcatcctgtgcaacggttttgggagtgtttcaggatttgcaacgaattgcataaatgtatgcaccatgcacgcaatttgccgatcgaagctggcagagctggagttgtgtttcgccaacatttacgccgtgtgggagtgtgggggaggaataatcttacctaaaaattgcgcaaaaagtgaccaatataagcccatatatagatagtaagtatatgataaataataatattattattattactctttatctttatatatgtttggtaagatttctccggggaggttatggattctccttgcgcaagccataatttttagatgttccgccgcgaaaaaatgtatatagggatatataggggatgacagcaaatcttaccaaacacgccgaaaccctttgacggcaaggcctgcggcctgtattatcaccttccgaaacattaccaaacgccgtaaatgtgggggaaacacaaatgcaatacaaaggctatgagttcgaagaagtcgacgtgtccgagtggatgcggtacgacgcagaaaagcaagccgcttaccatgaatggctgcaatccatcacgtttggtgacgccaccaggccagccggacggagccaggaagcagcgaagacggaaggcacattcactggcaaccgctcgaaggagatccggcgcatgttcctggatggcgggcggcgtatccagatgacggcggaggagttcgtggagaagttcggcgttaatccggtcgacaaccatttccgcaggccgttgctgaaactcctggagcctggcgaagtgttgcgagtgagcctgggagcggggttaatctccgtctttaccgagttcgacgcaatgactggctcaaacctggaggctgaggcatacaggcggcagggcgctatctctgagcgggaaagaatccttgccatcattgacgaagtaatgccaggaggcatcatgctaaaaggctataagctggcactaatcgccaaaatcacaggagcacaatcatgaaactatatccagaccaaaacgacccggcggcaccgatgcgcctgggagacacgccaatcagcgagcaggaggttatcgcagccattgccagggcatcggacgaagaaaatccaaccgccctggaatgcgtgacagccgacttgctgttaatgtcatttcttccggaatctgaatcctacattcagcacatcaccgagacgggccaggcggtgactaagccggaattcatcggcgcgtcgaacgtcctggcgatgatggccgatgagtcggataacatcatcagcctcgactatccgcaatagcactttttgctaaaacgccgatggcgagatccggtattatttacccatcgacaacgaactgaggtgatgaagatggataaggttatcaagatgagtgaagttaagccgggtatgatggtcaagtttgctggcaagtttcgcctggttctcgcagcagatcgcaaggcgaacattctcactattcgcgttaatggaaaggcccaactcttcgcgccgcagtccgacattgaagttgaagttcgtatcaagtaagcaaccttgaggtgaagatgagcaagaagaatccatattcaaccagcaactaccataacgaacacgtcatgcgctggcactggcagaaactcaaagagcgctaccttgcacgccagggcaaataatcgcaatagcgccgcttcggtggcgctatattcccaccaccaacacggcaaacgccaggaggaatggccatgccacgattttcagcaacaaccaaacttcgcaccttcgccgggatgccgatcccacactcatcaaccaaagccgtccatggcagcgagcacggcgtatacttccactggttaggcaagtggcgcttcaccgtcattcgcggcttttacgtgacctgcgatcgcgtagatattgccgaccattccggcgggaaccagattcacgagttcaaaaggcacgaatagcactttttgctaaaactcgaacggggcaatgcggtattattaccccatcgaaacagaggagcaaaaaacatgattggcaaccacaacaacgaactgaacgcagcagcccaccgtcgcgccgtcgagcagaacttcaatgcgcttaaagtagcctgcgatgagatgaaagcaatgcttgaactgccgtcatgggaaccccaactcgaagactactatgacggcctccgcgtcaagcgtgacgatatcatcaaccgcctgcgcctggccggaatgttcctgtaaggagaacgcaatgattcacgaagtcaaatccggcgagcaagtagtggccaccatcacgcagcgccacgttttagccttccagattaacatccctggcacgttcgatatgcggtcgcttgacgtgccagtttgggccaacacggttgccattgatgccgacggctcaatttgggcctacgagtcgaccgttgaaaatgttcgcctactgagctactcgcctgattcatgggtggacaaggggccgggcggaaacaaaatggttcaggttggcgaaatggatcgcttccctgattgggcaaaatcgaagattgaccttcgcggcctgaaatagcacgaatagctaaacgcccggttagaggatcgggcataattatcacgaagtcgattaacgaccaaattatgcaaggagacaggataatgcagcaattcaaatctcgaggcagggtatacagcctgccagataccgcaactcatgccgcgcccggcgtatgccacggcctttacttcatggatggcggcaagtggttcttcattggcgatcttatgacggattgcgtgcagccgctactttgcggcaagcatcgcggattcttcgatcacgatatcgtggaattggagaagaagcgcaatcctttcggtttttggaataaaatcaaaggggcgatctttaaatgaaccaactcgaattcctggcgcgggcgcaccgtgcgcttgcaatgtacgccttcagcaagaacatgaagattatcagcattgaaatcgagtcagacagtatcagcatttttggctatgtgggcgagtcgcgccatgtagcaaaattcagcttcccgtcgctggatagtctggagcatgaggcgttcggtttctgaatagcactttttgctaaacgcccggtcaggagatcgggcataatggccatacaccaaacaacggagattcacaatgaaacagatcgtcaaaaacgcagttgtcgccatcgtcggaaccaacttcgaaggcaagaaaagccgcattcaccttttgcacgtaggcaatgatggaaaaatacgcggagctttccattacggcgagcgcggggagcaccttcacagtgacttgcattccgttatccagctaaccactttcaacgaatggcgaacctatctggaatggctgccggaataccattacgagggattgattgtagaatcgttcgttgccgaccccacgaaacttaccgcccgcgactataagcgcatggcacgcaaggcgcacaaactaatgaaacgcacgccagaagatcacgtctggcatgttttcgcaaatcagctttgaggtggccggatgatacgtttatcagacttcgatcgccactgcttaaccgggcaatttggcgaaaagccagtgatgtgcaagatctctaaggtaaaaggcgaccccgtcgagcaggtcaatacgcttaaaggcctggcaatgcgcaaccgactttacatccaggtgcgcggcagactgttcgcacagcaggttcatttttctcatgggacgtggttctacaccggcggagacggggttggcccatcgccgaaaagggttatgctgcgcgagataatcgaacacggttacgtttggactaacgggatctactaatggaaacggtaaaagtaatttgcacgcacgctggctattcgccgctatccacctatttcacacctggccgcgagtatgacgccaggttcggccccggccttgatgaagtgtggattttgcaggacgaccagggaaccaccgaggatgaggaattctggcccgcctgccgtatgccggacgaaaagatcgccatgtacgccaataggccatacgaaaacaacgttttgtttgaggtgaaagtatgaaagtaagcaaaaagaaactcgcgctgtattgggccttcttcctggctggtctggccatgcatgacaacgtgggctggcagacgatcggaatgctgtgcatgattattggcgtatgccgcctgtctgagattaacgggttccgccgtgggtatcgggcagcgttcagcggcgaaaaagaatagcactttttgttaaaactgccgtaacgtcatttgataaagtggcgttactgaagtgaacaatccaatcaggagcaacgcaatgaacgataatttaatcgcactgctggaagaactgaattcctacggctgtgcatacatcgagctttcgagcgagcaggttattgaagtcgcaatcgacgatgacgccgggtttaccagattaagggtggcggcaggggccgaagaggaattcgaggactgcggcatccgtgaagtaaccaaccttctcgaatcccaccaggtgaaggagatccgataatgaaaaccgtcaaacttatggttgtcaatgcggcccgcgagcgtgagcgccaccttatcggctgcgtattcgatgccgtcgaggtgcacgaaccgctaggcacagtgcacgtaatccagggcggatacctgaacgaattcatcgtcaacccgctggacaccgacgaagacttgaccatccgtgttggtggcgagccggaaaatgcgcttttccacctgcggaaagtgtcgaaggcgtcgcagcgcaagttgctggttcgcgcactgaagcgcatagcgaagcagcgcggatacaccgacgcatacatccgcaagttcggcacgttcgcaggcgtcggcgattgggcgcggtcatgggccgacttctatttcaacaaatccggcgaattctgttccacccatacggactggctgcatggcacggaacacgatcccgttaacggccacgagtggtacgaattcattgaggcggaattagacgccctttgatagcactaattgctaaaacgaacgttctggggtggtgcatactatccccacaccaacaagcgaaggagctacacaatgaacactacacaaataattcacctgatcccgtcagacaacttcgccaaagaagacgccgacccgctgttagcagccgtcattcgcgccgggatcgattgggcgcttagtgatgcttcgtgcgaatcattcatgcgtgagccgttctcacgaatcgcggagcttgaaaagcaggttgtgttcctgactggtgaacttcaggcggctatcgccacgatcgagaaggttcgggaaatcatgcgcaccgaacctggctatgacgttgaagatcacgcgcgagctttgcgcatgatggccgacgctttcgcaaaactccagcaatagcacgaaccacaaacacgaatcggggttgctgcatggcaactcaatcaaagacaagggaaaacatcatgatttacgcaattattgccctggtggttcttattctggccctgtatgcgtgcggctgtttcctcatgcgggccttcctgaaatcggcggattctaccgacaaagaagatctttaccctgtgctttgctggccctggattactctttccgcagttggcagcgtgattatctcccgcaattttaagtggtgagatggcgttttgggtgcccaaatggattacctgccaaatagcacgaattgctaaaaccgatcatgggtaagctggtatagttaccccatcgaaacgaaacggagttacagcaatgaaaatcaaaatcaccaaagtagacactcttaacggcgacggctcaattaccctggaagaatgcggcctcaaaatcggcgaagttcttgaggtcgacggccacttcaacgacggctcctactgtgtaatcgctccgcgcaatagcgagtttatccaggctggtgacaatatcagcgtgagcgcagacgaatgcgaggtcgtggaagaatgagcaacaagatttgggtactgacatacaccattggaaccaacgaggggcgcaaatcgcgccgcctcatctgcgacacaaaagagcgggcgattaggcagcaaaccgttcttggtggtgaacttgtagagtatctccgcaagccggaagcgttcaaggtgaactggccggaaggcatggatatcaacggcgctttagcgagcctgcgtgagatgcagcacaacccgaagacgtggagcgactttcaatgcctgcgggcggagccggaagtgaaggccgacccgttcaccaatattcggtcgcagcacgcggagtggtcggatcgccagttcggcaacgttgggccagtcgggccgctcaagcacctggcgaaagaggctatcgaggccgccgaagcgccggatgacattagcgagttcgccgatatcctcatgttggtatgggacgcaacgcgccgcgccggattcagcgatgagcagttggctgaagcggtggcggaaaagctggaactgaacaagcgccgggcgtggggcgaggtcaaagatggcgaaccttgccaccacgtaaaaaattaacgaaatcgaatacagtttaaagcgcctgtaagcaattctggcgggcgcaaatttaaggagtgcgattgtatgcctgaatactcaaaagtcgaagatatgccgattggcgcaacgattacgggtatctgtatgagtgagtcggtcgacgccatcaagccgctggcgttcccggttacgcaggtggagacggacagcagaaaagggttcatcttcatctacaaaaatttcaatagtccgctgcgtgttgaagtgttcattgctcgcggaacctgggtggagtgggagaaggccaaatgttcggactgaatgaagcgcagtacaacgccgtgaagcgcatagcaaagcagatggccgcagaaacaaaagacgccatcaagaaggacaagaagacctacgatcaggtcgccgcgaagatgatcgataaacattgggcgcaaatcaacacgctggttactcgcggccagtttatctggatagctggctaccttgagggccgattcggtcgcagggatggcgagtatgaataaaaaacagccaaacgattcagcgacatattgacgcaatcgcgctgaccgggtaacgtgaaccacgtagacacaagaggcggtaaacatccgcaagtctagcccctcttaggggcatttacaaaggggttatgatgcagtacaaaatcatactcacggcaagaaaaatgggcggattttgcaagtcctgcattcaagagttcagcatgacgattgaggcgaacgacgccgccgacgcggtggagaaagcaaaaaagcaatccggcgtcaatctggatacgcataaaatcaacatcaactacataagggaagtaaatcaatgttaactctgtttattgcactgttaatgctgttcataggctatcacgttggcgcggctcatcttgtcgagcgcctttcaaagcgggtacatgaaggcacttttgctgccatgttctacaataagaaaacagcacgttgggaaaaagttggcgacccggaaggtgtcgcaaaacgaatagccttttcgccgcttccgtatgttgactgcgagcctttcgtgaaactccagaagacgctgaatcggcgaaacaaactgatataacacaagaacccgcttcggcgggtttttttatgcccgcaatctgatatactcgcaaatcaacatagaaggagggtgcaaa

SEQ ID NO: 31 - DNA, 50698 bp, unidentified
  source 1..50698: mol_type = genomic DNA
atgtctgaagaacgcaaaaaacgcgtaacgaaatcgcacttcgaaggcaatttcaaggcgctgtacgaaaaagattttggcgtagtgctggggcgaaccgccgaaatgactccgcaacaattcttcgagatcgcgaagggttatttccagtgggccgaagagaacgccatcaaggctgcggaaaccgccactttccagggcgacgttaacgagtggggcgtgaacaagccgcgcattttcacgatcacagggttaagcctgttttgcggcgtgaaccagtcaacgcttgtacgctaccgccacgacccgaactatgccccggtcatggagttcatcgactctgtaatctatgagcagaaattccagcttgctgccgtcggcatgattaacgcttcgttcgtcggtaaggaaatggggatcgacaagcccgccgttctcaacattgacgccgtggcgggcaacaagaacgagatcaccgatgaagtattggagaaggctgttagtaacattctagacaagatttaagggccgatcatgaatgacgaaatgattatttgggaagacctgaagccagccgataagctggcaatcaaggcattgagcacgcgcaacttttcgctattcctgaagatctggtttcagattatccagggcgaaaagctgatgtggaactggcaccactcctacttttgccacacggtagatgaaatcatcgctgggaagcgcaaaagcacgatcgtaaacgttgcgccgggttcgacgaaaaccgaagcgttttctatccacctcgcgccgtatgcgtatctcaagtgccggaaggttcgcaaccttcagatctcgcagggtgacgcgctttcaaaaggcaactccgaccgcgtaatcaagatcttttcatctggcgaatggcaggagctatggccctcgaaattcgggcggaagcagatcgacgaattccaggttttggatgataacgatcgcgtaaggctggaaatggtgtcccgttcgtctggtggtcagattgtcggtaagcgtggcgggtacatgacgcctggtttcagcggcctaatcgcgctggatgatatcgacaagcctgatgatatgttctcaaaggtgaagcgcgaaaagagccacatcttgctgaagaacactattcgatcccgtcgtgcgaagaagaaacaaggcgacgaaacgccgatcctgtccgtacagcagcggctgcatgcacaggattccacctggttcatgatgagcggcgggatggctatcgaattcgatcgcattgttattccggcgatggtaacgagggaatacggcgaatcgctccctgactggttgcgtcctgaattcgaacgcgacgtgttatccgggccgtcggtggtcattgatggtgtcgaatactggtcattttgggaggataacgaatcgatcgagaacctggttgccttgcgcgatgccgatctttatacgttcctttcgcaatatcagcaggagccaatcgcattgggcggcaacgtgtttaagtcggaatggtggcgctattacggcgacagcgaaaaggcgcatgaaccgcgcccggacaagttcgaatacaccttcattacggcggataccgcgcagaagacgaacgaactaaacgactattccgtgctgtgctattggggcaagtaccgagatcgcgtctacttcattgatggaatccgtggcaagtgggaagcgccggatttgcgcgtgcaggccgaggcattcattaagcagtgctggcgcagaaacaaggaatgcgggaatctgcgaaagatttacatcgaagacaaggcgagcggtacaggtctaatccaggatctgaccaaagcagttaatggcatgggtgagatcgtcccggttcagcgtgacaaagataaggtgactcgcgcgatggatgcgcagccaattatcaagggtggccgcgtagtgctaccggacagccatccgttcattgcggagcttgtggcggaaatgagcgcgtttacctatgacgattcacatccccatgatgacatttgcgacaacgtatttgacgccgcgaacctggaaatgaacctgagcgatgacccggtagagcgaatgaaacgcctggcaggattgaaaaagctgggccgctaatacataatgtgggcttaacggcccacaaattacacaaggttaaaatatgaaagctatcaagatggatgactacaatcagatcttcaatggtggcgcggggtacgcgtcaaccgtggcgatgattgcaagcacgttcggtactatgtcgcaagtcgaggagttctatcacaataacggactggcgaaaaagattgttgacgtgatcccggaagaaatggtgtcgcccggcttccagcttaacggcgtctccgataacacgaaattccagtcagagtgggacggccttaaacttgagtcgcaaatcaccgatgccctctgctgggcgcgtctgtatggtggctcttacgtcctggcgatggtcaacgatggccgcatgctgacttcagcagcgaagcgcggtaagccgctggaatcaattgtcgtttacgactacgattccgtgtccgtagcggaggaggagaagaacccgcgaagcccgcgattcggcaagcctaagatgtacaccgtcaagccactaaacggcggtggcgactttaatgtgcattatacccgcatgcactacatcgacggcgagcgcgtaaccaacaaggtgcgaaaactcaacaatggtgctggcggcacggtgctgaacaagtcgatgattgaagcgattcttgattacgattattcggagtacctcgcaacgcagttgctgaagcgtaagcagcagggcgtgtggaaggcaaaaggtcttgctctaatctgcgacgacagggagggcgaatacgcggcccggttgcgcatggcccaagttgacgcgaattccggcgttggtaacacgatcggcattgatgcggatgatgaggattattccgtgattaactccgatatttcaggcatcccggaattcttgtccgccaaaatggatcggattgtcgcgctgtcaggtattcacgaaattgtactgaagaacaaaaacacaggtggcgttagtgccagccaaaacactgcgttgcagacgttttataagctggtggagcggaagcgcaacgacgactacaaaccactgttagaattcctgctacaattcatcgtcactgaggaagacttcagcgtagagttcgaaccgctgtcactgccgaccgattcagagaaggctgatatctttaagaagaacgccgaagcagtgcagggactagtatcggatcaggttattgacgctaacgaagcgcgtgacactctgtccgcgatggttcccgaactgaagttgaaaggcaatgcgccggaacagaaaaatttaccggatcgcacgccaggagcgagcaagactaaaacgcaaagcacgcagatcctgaacaacacggaggagagcggcgatgaaagttaacggcagaatcccaaactggcgttatcctgaagcaagcgagcgggatttatcccgcttgatgcaggacgcgacaaccgatctggtggtagaaatgcgagatcggttagaccgcctgaagttcgacgccacggcggaggaaatcaacgaggcggaagacgatatcaacgaggcggcgatcgcgttctttgctgccgtcattgcggcgctggcctccattggcctgactatctaccgtttcaactctaagcagtggctggttattgcgctggcggctggcgggcgcgataatgaagcggtcatgatgctgaaggaattcggtgctggtggttatgagcagtggtatcagcaggcgctgaagaaatggcaggataccgcaaaggcgtcaattgagaagttaacagccgatatcgtcgctgactggacaacgaaagttcgaaccgccaacaacattggcaagactcgcgagcagatcgatgaaatcatcgagggccgatatgccatttatggcagttggtcgcgcaaccgggcgagcggcattatcggaagttttaacagtatgttgatgatgcagcgactaaaagatgctaaagtatcgcattacttttggttcggcatgatggacgaccgcgaacgcgaaagccacatcaaactcgaaggtaagcgacgccgcgtaaatggtgacggcatttttcccggcgaggagtacggttgccgttgctgggcggttccagattttaataacgtagaggaattacaatgaaaagagttcaaagattcgacacggtaaaggtgaaggcccgatttgatgaaaacggctttctggtcgataccccgatcgttgcgcgtatcggcgcacagacctaccagaccccgaacggcccgcgcgttgagtttcgcccgcgctccgaagtgttcgacgctgaatcgctggcgtcataccaaggcaagccaattactttgggtcacaagatggtcaacgcccaaaacgcgaaagggctggtggtcggatcctgttccggtgctggcaaagaggacgggatcggggttctggttccggtgatgatttacgacggggagtcgatcgagcaggcgaaaaagcgcgtagcggctgaattgtccgttgggtacacctcgatcgatatcgacagaaaaggctggggcaacaacgcaacgggcgaatactacttcgatgaagacctaccggaaaacttcgaagaactgaaaaatgattccgtctctgattgggttcgctttgatgctgtgcaaacgaagattcgcgttaaccatgtggcgcttgtttttcgtggccgcgcaggaattgcgaaattaaatcttgatagtgagcaagaatttccctatgatgacgactcaaaccacaaaggagctaaaacgatgattatcaaaattgacggcgtagacgtcgaagtagccgataacgtaggcgcacatatcgctaaactggacgcgcagatcgcaaccgcaaccagtcaggtaacgagcatcaccgcagagcgcgacgcacttcaaaccaaagttgatggcattgaagatgaagtggcggcgcgtgttgccaaaatcaaagccgacgaagacgcgaagcagaaagttgtcgcgatcgtctccgccgctggcatcaagtgcgacggcctggacgttaaagcgatgaaagttgcttacatcaaagaagcggatggccgcgacttgtcagataaagaagattcgtatatcgacgcttcttttgactttatctccaattctgataagatggcaagcaatcgctctaaagtcttcgccaaaaaagaagatggtgagcagggagacaagaagggcgcgccgaaactcgatggttctaacatcatcgacccgcaagccaaattccgtaactaataccgtgcggccttcgggccgctacaaaatccaaatcaaggagatttaatcatggcaattcctgcaacctatacccgcaagcgcgatatttgcattccgggccagatcgcggatacttcgctgtacaacatcgacggcacctgtgccgcagcaaatgacattttaactggcgttctggtagcgttgtccggtggcgttgttgatggtcataaagtggtcgataccgctaaaactgctgatgctgttctggttggcgtaaccactcattcccattaccaatcgccggaattcaaatacgacaagttttccgccgtaaacgttatgacgcatggtcgcgtgtggtgtcgcgctgcatctaccgtaaccgcagccgattgtgcttttaagtcgctggtaactttcggcgctgacggcaccgtggcaaaaggcgatgctggcctaatcaaagccgggtacactcacactggcgagtggttcaaaaacaaagatggcgatatcctggtgaaaatccagctaacgcaggatgcaaccgcgccagccgctcccgccgctggtggagagtaaaaaaataggggcttcggcccctttttcatgcgttaaaaaaacctttgaccgtttagcaattcgtgctattcttcatctcgttaagtcaaaacacacaaacaggagtttcacatgactatgaaattagatgcattcgagcagaatgcaatcaaggttgcaatgcagggcatgggcatcgacgccaacaaactcgatgcgcacggtatctggactgtcaatcagcttacccaactcttaaatcgtcagtacgaacaggcttacccgcaaactggtgtgctggagcttttcccggttactaccgaactgagtccggtaacgaaaaactttgaatggctggagtttgacggcgtgacttctgcgaaaatcatcgcggattataccgacgacctgccgaccgttgaagcgatggcgtccgagaaaactggtaaagtgttccgcctgggtaacgcgtggtttatctccatcgacgaaatcaaagctggtcaggcgctgggttccagtcttagcgaccgcaaagcgtctcttgcacgcgaaggccatgaaaccctggttaacgatctggtgttcaaaggttccgcgccgcataacatcgttagcgtgttcgaccagccgaacattaaccgtctgacctccgcaggctggactacgccggaaatcgcattcagcgagttgcaggatctgatcgagacgatcgaagatgtaacgctgggccgtcaccatgttaccaacatcgtgatcccgccgtccaaacgccgcctgctgacgcagaaaatgccggacgttacggaaagttacctcgcgtggttcaaagagaactacccgaatgtcaccatcactgcgattgcggaactggaagatatcgacggcgcaggcaccaaaggcgtactggcatacgaaaaagatccgatgaatatgtcgatcgaaatcccggaacgcttcaacatgctgccgatgcagccgaaagacctgcatttcaaagtgccttgcacttccaaatgtactggcctgatcgtgtatcgtccgctgaccatcgccattctttctggcgtgtaattagaatggcccttcggggccattttttattgttgcgaaaaacctttcgttgtgtttaaatcaaacctcaccaaaacaggagagatataaaatggctaaaaaagatactgctaccatcgaaccggaaatcaacgaaaagccgaaaacctcacagccggaaaccgcaaagccggatatggtaacaatggaaaacgtgggcgcttgcctgattaagttcgacggcaagaaagtgctacctggagaaaccttcgagatcgaagagtctcaagttaaccgcttccgccacgatatcttcaaaggccgcgtagaattccacgatgatattcgccgcactcgcgactacatcgcagcagtgaaagcgaaagcaaaaaccatcgtgcagcctacgagcgccgaataaaaaaccaataagggcgctacggcgtcctttttcatatctggagaaaaaccatgaattatacgattcaagatgtgatcgacaagatgcgcagcctagcgccgccgcttaaagaagtaccggaagaactgttaaccgcatgggtggtgctggctgaggaattcgtatgcgcttcaaagttcggagattcgatcattacagcgttggcgctgatgaccatgcacctgatgtttctggacggcgcaatgaagcaggaaggcgaaagcgtggaatcatactcgcagcgtgtagcgtcattcaccctgaccggggagttttcccaaacgttcgatcgcgtgtcttcggcgagtgataacgaaatgctatcaactccgtggggtaaaatgtactggcgcatgctgaaaatgcgcggcggcggcttcggccttatgaccgctggcggtctgcatcgttgcggcatgggaggttaaacgccatgaactacaaagcaattcatgcccgcgcgagtgcgggcattaagtttttcagcgatgccgatggcgtatttaacaagtacaccaaaggcgctggcggcggcatcgaccccgaaaccggggaggatatcatccctggcgaggttgtgaccacaatcaaaggtgcggtgcgggatatcaaagatcgcgatatcaatggcgaaaccatccttgctggcgacaagcgcggcttctttactcacgacgtaccaatcatggaaggtgacgaaatcgacgttgacggcgagcgttaccgcgtagtgaatgcccgcccggtgaaacctaccggaaccgttgttgcctaccgccctgttttgcgaagggtggcgacttatggctaactacaccatccgggagttcactggtgctattgatgcatggtgcaaggctgctggggacgcgctggaggatgttgtacgcatgacgtgcgaggatatcctaaaggatcttgtgatgcgctctccggtcgatacaggccgcttccgtggaaactggcaaatcacttttaaccgtgcgccgctttacgccatcaacgcatacgaccagacagggacgaagactatccagaacggcaacgcgaacattgcgctgttcacaaagggagccgggattacttcgatctggttcagtaacatgctaatctatgcgaacgcgctagaatacggacactcaaagcaagcgccgaatggcgtcatgggagtcgtcgcgatccgattgggcgtatacgtgactgaagcaatcaaacgagcgagggcgaaaaatgcactatgatattgcgttaaaatgtaagacagcagcggccaaatttgccgccgataacgggattatgatcgcgagcgataacgttgactttaagccgccatccaacggcgacacgtatcttaaattttcatacgtcgaagcggattcccgatctgttagcctctccagggagtgtcgcgtttaccttgggctggttcaggtcgatgtgatctttaaacctggaactggcaccgacgccgcaaggttaatcgcgcaaaatgttacaaaatacttccctgaaggtaaaatcttgggcgatgacaaaattaacctttacgtaagtgaatgggcggaaattcacgcggtgcagaaggcgcaaacagggtggttcttccccgttcgttttactgtaaggtgcgagaaagttgagagcgtcggttatccatccgcctaacggatcttcgcagtgcttataatttcttgccatccagctaactagcgggcataatggctaggttaatcaaacatcaaacaggagtattgaacatgcatttaccaaacggtgctaaagtcttctttgagaaggcacgcggagcggcgatcccattcaccgcaatgaccaatgacgcgttaaacccgaaaatcacagttgctgacggaaagctgaaggtgaaagatattgttatctttaccgattgcacttggggcgactttgttaacaaggtggctcgcgttaaagcggtagcggcaggcgtcgcaacgctggaggagttcaacacctccgatactaacaagtatcctaccgccgcaaccggaagcgtgagcgtaatctctgactggatcgaaatgccatgcattcaggatttaggcaaagacggcaacgagcagcagtattataactaccagtgcctgagcgacgaacgcgagcagtccgaaccgacctacaaatcggcggtaacgctcaactaccaatttgcgcatgagtacaacaacgcgatctacccgatcctgcgtgctgccgatgccagcaaagaggcaaaagcgatgtacatgtacgtaccgcgagcaagcgaagttcgttattggtctggtgtcgcctcctttgacgatatcccgtctacggctgtgaacgaaatggaaaccgtcacccttgacattgcgctgaagggttcgcacgtcttcctgcctgcgtaactggaaaataataactggcggggcttgtgcctcgcctttttttatgcataatagcattcaatacataccaatcaggagattacaaaatggctaagtttaaaattcgtattggcggcgaactcccatccttcaaacttccggtaactttcacttgccccgatggcaaggatgcaaccatcaacatgacggtaaaacatcactccaccgatgaaatgaaggagttttatgaaagcgaagaaaaagcgccgaaaggtaacgtggattttatccgcttcatggccgaaggctgggatctggacgaagaatttacggatgaaaacatttcctggctgtgctcgcattacccttcctttgtcatggcattgcctcaaacgtacatggccgcgcttgccgggcatcgtgcaaaagtctaaggcgggctgtttatctaacgcttcagcctgagttaaccgatcgccagcttgctgagtatggtttacggcgatcggattacgaggctgatttagaggaaattttcttcgatgagcagaccgcccaaagttggcaactattccaggccatgcaaacgcaatggcgcattgggatgaatggcccaacggggctggactataatacattgcctatgttctttgaattgtataaaatcgacaatcgagaagcggcattgcttgacttgcagatcctggagggtgaatacctcaagcagatctacaaaaaatcacaataagcgcctacgggcgcttttttcatatggggggctaacatggctgataaagtagctggcttgacgttcggcgttgacgtgtcgcaggttgacagagcggtgcgatcacttgccgaactgaagaaccaaagccaacaaaccggggcgggtcttcagtcgctggcggacgctgagaagcgcgcgacggcgcagactgaggaaatgaaccgcgcgttgcagaaccaaaagaaaaccacggaaaaggccaagaccaatttcaacaacatcgcgggcgctatcgatcccacgatctcgaaaatggctaacttgcgcaaggcttcggaagaactggataaggcctggcaattgggccttgtgccggacaaggaattcttccgcctgggcgctgtcattgagtcgaccaccaacaagctgagacagcagcagttggcgctaaccgaagaaggccgcgcggcaattgctgaggccgaggcgaagcagaaggcgaccaacgccgggcgtgattttgtcgccagcctgaaacagcaagcagattcgatcggcaagactcgcgccgaactactggaaatgaaggcggcacaattaggcgtttcaactgaagcggcaccgttcattaacgccctaaagcaacaagagcaggcgttaaagaaacagcagaatgctatggggcttgctggaatttcagcgggtcaatataaaatggcgatgcgccaacttccggcgcagatcacggacgtagtaacgtctcttgcttccgggatgccagtatggttagtggctattcagcaaggcgggcaaatcaaggatagcttcggcggtatcgggaacacgttcaaagttttgttgagctacattaacccgctaacagttggcgcggttgctttgggtgttgctcttgcggctatcgccaaagctgggtacgactcctggaagtcacagcgagatctagcgaatgcattggtgctgactggtggctatgctgcaacaactaccgggcaaatcacctccctaaccgatgaaatcaataaaacatcatcggctactgtcggaagcattcaggcgatcgcaacgtcactggctcaatctggaaaatacagcatcaaccagattaaggcgatcacgaagactacggcggaatgggcggcgcagaccggggagagcgaaaagaccattactggttactttgactctatcgcaaaggatccggttaaggggcttgccgatctgaatgatcagtttaatttcctgaaggaagggcagttaacctacatcgaatctttgcgaaaaaccaaaggtgagacggcagcagcggaagcggcaacgaaactctttgctgacacgatggataaacgcctgaaggatatcgcagacagcgcaacgccgcttgaaacgatgtggactgacattaaaaagtgggccgcagactcctggaagtgggtaggcgatcacaccgtcggcgcgttaaaccttatcgttgacacggtttcatccatcatcaacgttatcaggaaactgattgcggatggcgacgccatgatcgcacaattcatcgttgatgctggtcggcagttgcagaaagtgcctggcatgggtgactttgggaatgattttcttgcacagcaagaacagctaatcaaggattccaaagccaaatcagcggaactggcgaagaccattgcggagcagcaggcaaggatcgcaaaaggcgagatgggttacatcgacgccgcaaagaacaggacgttatctggtggttacagcagcgctacaaaggacaaggtaaatcaggaagaaaaggatatcctgaagaaccgaaacgccaggaaggagcaggcagacgccggggttaagatcgatgaacagtatcagtccgaattactgtcattgcaggcgcagttgaaagtattgcagcagcacaaagggcttgacgacaaaatcagccagcagcgaaaagactactttaccactgtcgccaaattccaggtgctggaagaagcgagcgccaagcgcaaactgacgcagagcgaaaagcagatgttagccaataagcaaagtatcatcgctatggcggaacagaaagcgatcgtgggcgatcagattgtccggcagcaacgcctgaacgccctgcttgacaagtcggtgaagtatcagaaccagatggctgagaagactaaagcgcttcaggataccgcagggatggggagtaagcagcaggagcgctatagagcgaatgcgcaaatgtcggcagactggattaatagcggcggctcgcttgacgacgcccaatttaagcagatgcaggcagcaagcgacaagttctatgcgcagcaggatgcgcagatgcttgactggaaggctggcttcacgcacgcgtgggctgacattggcgatgaagttaataacgtgtatggcaatatcggggatatcaccaaaaacgcatttaacggaatggctactgtgctaactgattttgtcatgacgggtaaggccagcttcagcgacttcgcaaaaagcgttattaatgacattaccagcatgctaatcaaaatggcgctgttcaatgcaatgtctgctgcgttcggcggcggcggtacgttcagcttcgccagcatgttcagcaaagggttcgctaacggcggctatactggcaatggtggcaagtacgaacctaaaggcgttgtgcatggcggcgaattcgtctttaccaaagaggcgaccagccgattagggccggaaaatttatacaggctgatgcgtggctatgcttccggcggtctggtaggctctaacggttcgtcaggatctggtgtgacgaatggcgggaatgttgcggcatcggcagcaatggtgtttagcatgggtgacgtgaacatcacgatgggttccggtcaggatggcaaggggttagagcagggagtaaggcagatcgtgaatgatatgttcacggaggcactaagccaaaacggacgcatttcgaaatacgtaaacgagaaaacgaggggttaacagtggattctttttcatggtgtactcaaattcaaggaggggcggcgaaagtcgccgtttccaacaacgtgcgagcggttagtttcggtaatggatacatccagactgcatcgagtggcatcaacacaaagcgccggacggttccgatcgtttatggcgggagggattgggaggcggtttatgatttttgccagaatcacgtgacgaagccatttatctggaaggcaccagatggaagaatgggtgtattcgtcgtaacggcagactctgttaatctctcgccgatgggtggcggggtgtatgaggtaactgcggagtttgcggaacgattctcttcagccggatagcacaaagcgccctttacgggtgcttttttttggcctatgatctggagtcgataagaggaggaaatttatatgacaactaacgtttcaaaagagtttgcgaactgcttgcaaaagctgttccctggcgagatcttaacgctgattgacattgacgccacgaagttcggcgggcaggtctaccgattccataacgagaatatcgcctactcaaccgaagaacttttggcagcggttaacggtggcacgctgacgccaaaggcgatcacgtttcgcggcgagcaatacggcccgcgcccgttcgggatcggtggtatcgcaatgtcaagtgacggcacggtagaaaagccaacgctgacggttagcaatattgatgcgcaagcgagtgctcttattcgcgcctacaacggcctcatgcaagcgaaagttacggtatgggttttggtcaaggatttactgaaagaagatggtagcgtcgctgatggcgattttcggcggttcgtttactatatcgaaaggcctaagcaggttgacccgcagaaggctacatttgaactaacgtccgtcttcgatatggatggcttgatgattccggcccgccaaactcaaaccgtttgttattgggcgcaacgcggctggtacaaaaccgggaagggatgcggctacaacgggcaaaacggatactttgacaaattaggaaatagggttgatgatcccagccaggatgtttgcggaggtcttgtttcgtcgtgccgattgcggttcggcaatgaggctttggattttggcggttgcgctactgcaaccttgaaaagcggacggtaatatgttaactccaaaaatcaaaatgcagatcatgcagcatgcgaaggaagtttacccgcatgagtgcgcagggctggtaacgcagaaatcacgcgtgcaaaaatatcaccgactcgataacgtttcgccggatcctgagaacgaatcaatgcctgacgaaacacagtacgcgctggcgtcactggaaggtgagccgatcgccttcgttcactcccacactggcgacggggcaaccaccgttccgagcgctacagatttatgcttctgtgatgaatctggcttgtcgtgggttattgtgtcgattccagaaggcgatatgcggattatcgaaccgaagcgcaggccgctgattggtcgcccctgggctttgggcgcgtatgattgctacggcctggtgatggattttcacaagcgacacggcgtaacgctgactgaccgccgccttccgttcgaatggtggaagccggaatacaaagaggatctttaccgcgactactggcgcgaagatggattcatcgaaaacactggcgatcccgaagtcggcgatatgattatcttccagcttcaggctgacaagtggaaccacgctgggatttacgttggaaacaataacatccttcaccacgccttcggcaagctatcgcgccgggatatctattccgggtggtatgagcagcacaaggttttaatttgcagacataaggatcttaaacatggcatcacatacaaagacgattaaactttccggctccctggggcgtcggttcggtgtcttccataacctcgcggtcgattcagtcggcgaatgcatccgggcgctatcctaccaggtggaagggtttaaagccttcatgcaaagcaaggttggttctaacatgcgctttggtatcgtcgcggacggaaaaccaatcagcacgaatgactttgcaacgttcgccgtagcgaaggagattcgaatcatccccatcccgaaggccagaaagaacggcggattgttgcagattgttatcggcgctgcgattatggttgcggccttcttcactggcggtgcatcgctggcggcgatgggggcgttttcatcggcggcgtttatggctggtggcgcaatggtcttgggtggcgtaatgcagatgattgcaccgcagatgggcggaaacatgcgagcgagcgagtcgccggaaaacaaaccatcgtatgctttcggcgggccgattaacaccacggcagcgggttatccaatccagttgccatacggttacagattggctggtggcgcgctgttcggttctggatcttacgccgaagacaacaactaattaagcgattcgctttttagcctgggggcatagcctccgggctttttgtcgtgtacaattgcaaaactattaacaggaggctaaacgatgactaatatcaaggcccgcaagggcggttcaagcaaaacgcgcactccagtagaaatgccagacaacctgatctcgaaagacaagatcaagttattgctggccgtttctgacggcgaagtagtggatgacttcagcctgaagcagttgcatttcggcggcgttccggttcagaacgaagacgggagctataactatgagggcgtaattgcagaatttcgccccggtacgcaaacgcagaactacatccagggcttcagtgaatcaagcgctgaattccaggttgcacgcgacgttacctttaacactccgtactcgctgacggtatcgaacaagaatctttctgctatccgcttccgcctgttatggccccgcgtgctgacgcaaaaagataatggcgatatggtcggttcggtcgttgagtacaagatcgaaatggcggttgacggtgcgagctatcaaacctacttgaccgacaaaatcgacggtaaaaacacgactggcggttacgatcgcagcattcgcgtcaacttgccgcaagacttcacgtcgcaggtgcttatccgcgtaagccgaattacgccggacgctgacggggtgaaggtagtcgatgccttccaggttcagtcctacgctgaggtgattgatgcaaaattccgctacccgttgacggcaatgctttacgtcgagtttgatagcgatctgttccagaaccagattccgacaatctcgctcaagaagaagtggaagattgtccaggttccgcgcaactacgaccctgttaacaggacatacgccgggacgtgggacggaactttcaaatgggcgtggagcaacaacccggcttgggttctttacgacctgatcatgaatcagcgttatgggttagaccagcgcgagttagggatcccggtcgacaagtggtcgctctatgaggtggcgcaatattgtgatgagcttgtgccggataatcgaggcgggatggaaccgcgttacctgatggatgtggttgtgcagtctcaggttgaggccttccagttggtaagggatgtttgttcagccttccgtggaatgacgttctacaacggggaaagcctttcgattatcgtcgacaagccacgcgatccggtttacctgttcactgctgataacgtcgttgacggcgtattcgtgcgaacatttccgagcgaaaaaacgatgtacacatcgtgcaacgtaatgttcgacgacgaagaaaaccagtacgagcaggacgttgaaccagtgtttaaccctgacgctgccatgcggttcggtcacaacccgacaagcatcacagcgatcggttgcaccagacggacagaagctaaccgccgcgggcgctggattctgcaaacgaacctaagcgcaaccaccgtttcgttttctactggcctggaaggtatgatcccttcgtgcggcgatgtgatttacgttgcagatccgcattggcaatcggcctttaacctggttttgtcaggtcgcattatggaagtaacgggaacgcaggttttcttggctttccgctgcgacgcgaaggcgggcgatacgctgattctgaacactgacgacggtaagccattacgtcgaaccattgccagcgtatcagcagacggaaaaacactgacgctaaacgtgggatataacttcgacgttgcgccggacagcgtattcctgatcgaaagtgaccaactggcggctgaacagtacgttgttaccaggattgagaaggggagcgatgacgacgaatttactttcgcaatcacagccacccaatacaacccgaacaagtacgacgcgatcgacaacggcgtaatcactgacgaccgcccaacgtcggttgttgacccggattcaatgggagcgccggaaaacgtgtcgattagttcattctcacgcattgtgcaggggatgagcgtcgagacgatggtaatcggctggtctgccgtgcagtacgcaaaactttacgaggtgcaatggcgtaaggatggcggcaactggaacaacgtgccgcgcacagcgacaacgcaggttgatattgaggggatttatgctggcgaataccaggcgcgcgtaaggtgcattagcggcggcaatatcgcgtctccgtggtctgctttggcaaccgccacactgaccgggaaagtaggagcgccaaaaggaccgattaacctttttgcgtcggacgatgagatctttggcattcgcgttaagtgggccatgccggaaggtgcggaagacacggcatacattgagctttaccagtcgcaaagcggaaccgatcaggatgcaagcctgcttaccctgattccttacccggcttctgaatactggcattcaattctgcccgctggctacgtgaacttctacaaagcaagaagcgtagaccgtatcggcaacgtttcagcatggactgattacgctcgcggtatgtcgtctactgacgttagccttatcactaatcagatcctggatgaaattctggatagcgatgcgtttaaggagctagaggataatgcagttgatagtgcaggtaaacttagtgactacgctaacagcataattcataacgctttagcaaatgactctgacgtaagagttatgagaaaggagaatggaaagaggaaggctgagtaccagcatgcagttgttctcattgctgacgaaagtcaggcaagagttgacgcaatagaaacactgagcgctgaatttgatgaaaaaatagacgctaactatacggaggtaattactgctttagctaatgaaacagaggcaaggacaactgcggaaacggcattatcagcaaggattgatgacaatgaatctgcgatagaccaaaaacttgattcatgggctaatgttaacggtgttggctctatgtacaccatgaagttaggtctgaagtacaacggacaggaatatagttcaggtatggccctacagcttaccgctagtggtggaagcgttgtttcccaggtgctatttattgctgatagattcgctatcatccgaaatgcggagtctggagcgtacacgttgccttttgttgtgcagaatgaccaggttttcatgaataacgcgctcattcaggacggttcgattaccaatgcgaagatcggtaacgtcattcagtccaacaactacatcgccgggcagcaagggtggatgattaacaagaatggaggttctgaattccagaacactactgttcgagggactatctacgctaccgacggcgtatttaaaggtactgtacaggctgaatcgtttataggagatatcgccgtagccaaacgctatgacggcatgacgctccgccgcaaccagacagtgcagcgcaacggcttctatcagaatcgcgggtatggcatgaccgtcgtgcttgcctgtacgctggtgtgtgagacttacggaagcggaagttcacagcttggttatacagttgacgttacgtttaacatcggtggtcagcaggtggtgcgacgcatttatgttgatgctggtaacattgtgcagggtacaactgccgttgagcttcgcttcgctgccgaccttgctgctgataacaacaatgttagcttcttcatcaaggccaccgggcgcgacgcagtaaccgactataccgtgacggtcgacaacatcacagccaccgcgttccgtacaaacagcaactcattcagctaacagaggccccgcgaggggcctttattttggacaaaagaaaagggcctttcggccctttttttatataaataacacttcacaatagatcactacaatttaaatcatattgattgtaattcctgagctaaccgccgcaggccgtagttagtgccaattgtttcgtatgccattatttggaatcttaatcatgaccaggctttacatcctccgaacctgcgaacattggcagggtctttatgtattcatacccttgtttaatgatgtttttactttcctcccaatctggtgtaaatgcaaatgattgaaaaacaccatccacaagttcatcattgatattgttgcaaaggaatacatccagattaactgagtaacggccccccctaaaggtggagattaccgcgtaattaaaagttatcgtgtcggtggtcccgtctaacttaatagacgggcgctcaataagaaaattacctttaagtgccatttttagttctccagaatatatcgccactgcggcattgatgttactacagtgccggttgttataattaaaacttgctcctgtaaacgcaagtcaagcgcaagcgtgtgaagtccatcagaagtataacggtgtcttacttgtccgttaactgttactgatactgaaccgccggaaatcgtaaaaccaacggtgtgccttcctggcctgcggtatgggtatgaaaacatcgaccccgctgtaaacgttgtcccttccagtggatgagacgcttcacgcatcgcaaatgacgattgagatgtgtctccgtatctaaccctaacaaagtttgttgcccttgtgtttaccggcccaagctggtttttatcttgcaagtaaataaagtagttagacgtgtttccatccagttttgcagcttcgccaaaagacactaatccagtattactggtcgatttgcattcaatgaaatatagttcagcttcggttttgtctgcgtatccagcatgggcgttattcgtccataagttccagtgaaactggaagtctccgccaactgtttcgtcaatcttaacgattggtgcgcatggccaaccaaactgtgacgcgttcagattttgagcaaaaccaccattgaaaaacaccctgcttggatctagaaccgcaagaactctctggccgcggtatttcagcctgctgaggttgtttgtcatttcaacaagcgttgatacatcccaagctgtcatatgctggaaagttacctgcgaattgaagccaacacgcataaatctaccagagttctgaacgtgagcgccagaaatatttacctcagagttacaaacttctagagcatacagatcatcagcagtgttagacgctgcatatgttgtatttccgcatatggctatatttctgtttatatggacgtttcgactatcccaaatacacaaatgaccaacgccgccagcaccaataagaatattttttagtgacatagtgccacattcgctgaatatcagtccgccagaagtttcgttgtgtggcacgtaatcttcataggtcatcgttaaatcgtagcaattcgatatgtaacccggcactctgttgttctgcgtccatactgagttccaatgccccatccccgcaccggtatttgtgaaataaaaatcacgcccacaggttttaatgttaagaacaacatcgccaacggcctgaattgacggaagaacactaacaagatcgggccactgagcagttacagcgctatagtctttctttccggtactatacaacaccgtgccagggtaattggccgcatggatatgcaaatccggggcgttaaccatcgactccattctaagaatgtagttattttgaacaagtgtggcgatttgttcatcagtgtaattggtcgtactgaaagcaacctgcgagttgtccacgcgtagcctcactgatgggttgttcgcctgaaccaagaaaaacccagccccttcgccaattgcgcatgtcatatcaaagccgaatctgtcaccaccacctgtagtagggtacttccatgaaagtgattccgggaagtttccgcagcgtatatagtgcctttgagcaagatacactacgccacgcggcacgccggcgatgattgattgcggatatccactatctgacaattgcgcagcagcaagcaggcagttttcaaatgctgcatcctgtggcgctgatgtttctgccatacttttagcgccagcccagcgcatgcgaattgtatttcctaaaaatcttcgcttccatagcctaccaagtgcatctcgaaggtgtacgcagttatcatcaataatcgtatggtcatcatcgtcgattaggtcgaaaacaccatgaccgccatcgccagcaacagcaaatcctgatacctttatcttttctgcgttgccagtatagcttctgatataagagtaattggcttcgccaatatgtttaaacccgtcaggctgtgtcaatgctaccagcgttgactgttcgccagaatcatcaatgatctgctgaatttcatcgcgcactgctttggcgttagatgctgcctcctggcttgctgccgctgcctgctggcttgctgctgctgcaccctggctttccgccgctgcatcttggcttgctgctgcatccccttttatctgttccaccaatgcttgcaaagtggctaaatcaaagtctttaaagaaatctaccgcttcagcaataacagtttcctgtgattgatagtaacgaagagtttcagccacatcttgcgccagtccgtcgacggtcagtgagtcgcttaacaggatcgcgtaatcactggacggaacaaccgcgccgtttgtggtgattgcattaatttgcgtgtcactgacaaccttgttaactaccgccatttgaattggtgacgataaaaacaggatcgtagagccggggcgaataagcgttagcgctgattgccagttagttccagtcccggtaacgatgccgcttgaatccatcgcggctttgccttgtctgtatagtgccattttaagacctcttttcgtttgttgaatagcgcagagataatagcatcaatgaagcaataaaaaaagggggcttttcagcccccccccacccttggttgtcaaatcagaacgggatatcatcatcgaaatccatgccatgattaccaccaccgctttgcggcttcggttgttgttgcggcttcggttgctgaggctggccccatccaccctgctgattaccgccgccctgcgttggttcgcgctggctgaattccagttgcggcataatcatttcattgtggctgtaagtcgcgccgttgtgctcgcggtttacgatctgaagtgtccggcaggtgacgctaataaccttgtccacctgcaacgcttcatcgtaccacgcaatcatgctttccttcgcgaagaagacggcgcgatagttggtgtatacagtttcgtcctggccgtcgcgattgcggatcttcattcgctccgacaggtcgaccgcatacatcttccacggcccgttattgttgctgccatcttttacgtaaggcgcttttcggattacccctgttacaacatgcattgtttttcctatggggcggtttcccgcccggttaaattagttgaaagatgagatatcttgtgcttcaggttcaggctttgattctacctgttccggctcacgtttcgcaacctcttgcggcttaccgggattaaatccgttcgctggcgtcactttcagttgcgcctggcgcttcgtgatatcgtcttccgtaaccttccattccgcaggcgtcaacgtctgtttagccagcttgtaaatctcgcggagagattcgaggtcttcgcacgcatcaatgcgttttttgaagtcttgcggcttcatcttcgcgatctctgcgtcatcgtctgcctgcttgatgcccagcgcggcggctaacgcataacggcgagcgtatgaggttgtcgagccatatgcttgctcaacggttttgctgatcggcatgttgaactgaaacgccatccactcgccagattcgtgcaggaacatcgtttcaaggtgcataaccttgtcggtgctggtatccatcattgattgaatgaccataattttgttcttttccagcgaaggcccgatggcgtccaggatatcgccgagattggcataggtgtttccaaggtggctattcttcccgcttttcttcgcagcgacgaagccagacttcgctttgattaatgcaacggcgatctctttgaaactttcagatgtacgcatgacaaactttccttttcctgattggtggagcgcactatatcacaagtgcgccgcagtgtttagctatttgtgccgtatacttccgggaacatgtatttcacgaattgcggcgtgggcaacttcacttccgctgcgttcgattcgtatgacggccaaacgtcatgcttgacgcattcggcgtactggtgaatcacgctttgatactgcttccgcccgatctcaatctgctgatccgttaacgtgaacgcgagaggcgcgaacggtgattttttctcctgagtcagcaggcggacaaccaccgggcgtttttcgttgtacgtcttaacgaacagatcgcgctgcaatgccattttgagatagtagcccaggttgaacgccagccgcccgaagtcatccggtttagaggtctgagtagttttgtagtcggtaatcacaaccacttcgaaaacttcatccgggttaaacccccactctttgatgagttcgggatccgaaacgacgtcaacatgatcgagtcgaacctttaccggaacgccgaaaatttcgccgaagattgacaactcgcgttgcgctgtatccgattcaatgcacgccgcgtgccgtgggttagccagcatcacgtttcgcatttgcacgaccgcatcgaaatcagaatccttgaccagcttccggcctgagttgatggcggcgctttcgtcgcagagttcgatcgcccaccacacgttaacatcaatcccggcgcggtatgccatttccagcaattcggggtagtccttgttggacgtcccaatcaggccacacgctttcaatttcgcagacaatgccgacttcgaagtaatcagatccttaacgtcgccaggcgcggtcgctcgcaggtactcgccattaaatttggacgtctcaagcatgcaggtatgggagcaggtgccgaatgaaagcgcggctgtctcctcacgatccttgtatttccagtgggccggggatgttgcgtaaatctcgccgaggcttgagccgctaacgtatctggcgcaccaggagttaggatcgtggtaatcatcgttggataattccgcgttggtgtatgccttaaaaattgcttcagccattggtatcactccgtttgttgtttcgttgcgttaagtatacgcatcacgattccaggtgcaaggcaaaaagtgctattcgccaactggtcaaaaaatgagcgaaatttacgtaagatttagtaagatgcatcttacgtgattttctttatatatttcattgagttaacacaaatcggtaagatggtaagatgcctataggtaaatattcacagaaaaattggagcggaatcgcaaagcaaaatacatatacccggagaaaatcttacctacacagatagatagagagagggtaataataataatatagttagatatcatatacttatatatattctatggtgcgatattggttaaaaaatgagcgaaatttacgtaagattcatcttacctaatcttacttaaagtggtcgaccagtttgtaagttgctgaattttgggcataaaaaaaggtaagactgaaattatcaatcttacctaaaatttgttcacgtttaaatcagagaagggatgatgccacgtagagctttcgttcgaatccgcctttgaagttgtcattgttcggcacgataactttcatatcgcgttcttcagccgccgccagcatatcccgatctttcctgctgcatacgactcgcaattctcgcttaccttcgccaccacccttccctttatatcggtaggccacgatctcaacgttggacgggatgatgcatgcccacacgtcacacttaaacgagcttgcgatattgaagtgcatcgcttccacccaagagcgagccaggtaaattggcccgttaccgccttcgctctgattggttacgatcaccgatccgaaagtcaggtcgccagctaacatcttctcgcggccctcctcatcaatgaataagatgttgcagtattcatcgtccggcccgtcttcatgtaccagttgcatcgggagtgcatgaaatagctcttgcctgccgttctcgtgggtttttactccaacccggtatgattcaacgaactcattttcaatgccctcatagagcgttacaggcgtgctatcgacggcctctgttctgttcattatcgccacgacgcgatcgtgatctgccatttttccgtagtcgtacccgttatcgcgagtaacctgcttgttgcgcttaactacgtactcttgcggaactttgcccaggtatcgcccaagaatgttgatgcactcgctatacggctcgccgctcaacttcattaaccatccgatccccttatcagcaccgcagccgctgcaatacgctcctccgtcgccgcgattctctaatttatccgtccagcggaagcgatccttgccgccgcagttcggacagtcctggtgtttgccgttgaagtatcgggagtggatgccgcaaatgttttgtagcgcatcgcgccacatccccggcatgtatggcaaaacctctttttcgtcgtaaaaatccacgtcataacctccaaataaaaaacgcccacgcgagaatcataacccggtaggcgtttagtagttagtcaaattgtgctatcggactactcgaagcatttcgcggcggtcgcagcggcgcgtaattggcttgccgttgctgtcgaatctgagatccgggcggcaaaatgaagccctaaagcctttgcagtcattgcggcggtaactcttatgaaccaagtaagcaccatcggctgaaatcatgccgcgcttaatccactgctgaacaacctggatgctaacgcccaactcctttgctgttttggcgatgccgccgtatgcctcgatcaccaattccatcctggtagtcaggcccgcccttacttcatccttcaggacgtaatagcctgtcggcttcttgcggggcttcttatctttcccgcgtgaagtcccgttattgccgttcaaagttcgcttgtctacctttgccatttgttccataatttaacctcacagcactttttgttaaacacgataaaatttgctatgtattatacacgcaaccatgcgaatgacaaatcaggattaaacatgctgacaattgaacaacaaattgaagcctacgcagacaagatcccatctattcaaaagcggttcacggtcgggaatatcgttccgtacccgtaccaggctgtcgcgtacatcgagacggcgaagcggatcgcgaactatgagcacccgttctacattaaggcgtccgtatccgcaggcaagacaatcatgatcgccatgctcgcggcgcagtgcaaaacaatgaacttgcctatgatggttctcgcccggcaggctgagatcgtgaagcaggattccgaagaaatcagcaaccttgacgtgccaaactccgtttattgcgccgggttaggcacaaaggcggcttacttcccgatcgtcgtcggctccgaagggacggtggttaacggcctgtttaagatgctgggcgattacgtgccttcagtcctggcaatcgacgaatgccatcaggttgactggcaagacctcgccgaagcgatcgcgaacgatgaatccttcgagtacatgagccgcgctaaggataagccgtatcgcgtgaatggtgaaatcgtcgatgccgattacccgtacaacgaaaagttcgaaacggttgaatttggtggcgggcgcactcaatacaccatcgtaatcattgagttaatgcgccgttgccttcagaagacagggcgagaacttcgcatcgttggctatacgggttcggagtttcgcggcgtcattccgatcttacaggaagacaagagccaacctggtttctggcgcgagcagatcacggacattaacacaaactaccttgtcgaattcggttcggtggttccgacaatctttggtgacactgaggccgacggcctgggctatgacctgtcagagtttcacggctccagtcaggacggcacgcaggattttagcgctgaagacttgcgcaagatggagaagaaaatccacgattccggcgaaatgactaagctgattatgcagaaggtggtcgagcgtgcgcagacgcgaaacggcgtgcttatcacttgcgcgggccagcgccactgtaaggaggcggcgagctacttaccgccggacgccacatacgcgatcatcacggagaagaccaactcgaagaaacgcggtgaaattctggacaaggcgaacaggggcgagattaagtacatcttccaggtaatggccctaacgactggcgttaacgttccgttttgggatttttctgtaatccttcgcaagatcggttctctgacgttgctgattcagcttttggggcgaggaatgcgattgctcaaagactggcagaaggaagcgccctattcgtgggtgaaagaagatcaccttgtctgggattttgccggaacaatggatgacctgggccagttgtatttcgatccgattttggagcaggcgcagtatcagaagcgcaagagcagcaagaacggcccgaaaatctgcccggtctgcaaaggagaaaatagcgagtacgcccgccgctgcatccacaaggatagtaacggcaatcggtgcgagtatttttggacgtcccagcgctgcgaagaccaaaaggatccgaggacggggaaaatcaaggtcaaggggtgccacgctgaaaacgacattgtggcgcgccagtgcagatgttgtggcgtgcagttaaaggatcctaacgacaacctcaccgggaagcactacacgcaaaatgactggtatcaggttgtaggctttgatttgggattgacacgaaaccaaagcgggatcatctttaattacgtgttgctcaaccatgacggcgagaggttcacggccagggaaaaattcttccctgagtcagaaagcgcgatttgcggtaagttgtggcgacaaaaggcagtcttccagcatgttgatgatgctgtaatgcgtggcaagttgggcggcatgaaaagcgcccgcaagatcctggagtatgcggaatacttccgcgctccgaaacgcgtaactcatcgcatcaacggcaagaaggaggacattatttcccgcaaagactttggaggcgaggagtgattacagacaaaggggattacctcgaatattacggcgggcctgtaaaggcttgtccgcttgaaaaaatcgaccagatgaacagcgtttcgtggttgcgttacgaacaccccgattatttgttctggcatacggtcaacgagggcagcaagcacaaggcgagcgccgttgcagatcatcaaatgggattgcttaaaggcgtaagcgatatccttgtgctgattgggctgggcggcaaatacccgttcgccgccattgagctaaagcgccagggtaaatcccaggcgtcgccagtgagcaaggagcaacgggaattcctcgcagcagtccgaagccgtggcgggttcgctgccgtggcctatggattcgagcagtttaagatcgctttctgcgatgcaatcaaatagcactttttgttaaaacttcccggcgaaagtcgggtagtattactgcatagaaacgaagaacggagtattgaaagatgaaaaagatgcttgctttaattgttctgtctattggtcttattggttgcagcgaaaaaccaaaaacatatatttgcggtaacgaagcatttgaggttacgagcgattatattaaggtagttagcggcaagagcgctggcgttttaattgatggcattggtgaaaaccagtataagctgtttacgccacttggaacggctttttatactgttaacaaaaacaccattgatattaaagttagcgtttatcataacactctaacttgcgaggttaagtaataatggcaaaagatatcacagacaaagacactcacgacgcgttcacgacgtttgaacagcttgaacgtgaaacgttcataggcaacgcgcttgccactggcggacactatcaggccgtcaagcctgataagttctaccaggtaacgggcaaccgctacgccgggagcaagacaccggatatcgtccgcgacaagtggtcaaccgatcgcagccttattgcttacatggaggagcgttacgggccatacgacctggacgccgccgccgagaaaagcaacaccgtatgcccgaagttttacgacgaaaagaccgattgcctcaagcgctggtgggggaaaaataagcacgtctggcttaacccgccttactcgttcccggatccctttgtgctgaaagccattgagcagatggagcatgacaaccagatcgatattttgcttccaggcgataactctacggcgtggtttcgcgacgcacagaaggcagcggctgagatcatttggattgtcgcagacgtcgcggaggacgaagacggaacgcaactaagccgatccggtcgactggcattcatcaatggcctaagcgggaaaccagtcgacaacaacaacaagggcagcgtgattttcatcatgcgcaaactcaagccgggcgaggagcaaaaaactttctacgtcccggtaagcgaaatctgcccgtcattaactaaaaagcgcatgcgcaaacgtgggatctgaaaaatggaacagcttgaatctttcaccgaatacctacacatcatcgttactcttctggacaagtacggcttcatcggtacggatgaagaaaagatggccttcgccgatattatcgacggcacttatcaagagttcatggataacggcactccgcttgctgactggcccgcgattcttgagcgcgaattgctggattttcgggcgcgtgaaggtgcggaatatttcgcgaaacagcactaattgctaaacaatgcccgccgcgagcgggtattattgttccatcacccaatcaggagctaacgccatgaacaccaaaaccattgccgataccatcaagatcgcacaagttaagccgcacatcgtatcgcgccacctgattaacctttctcgcctgtgcatggccgactacgtggcgaagcctttagagaatggtcttgatggtgaaatcggcgcgatctacttccgagccgcccacggcatcgaagaaattcacatgtatgagcagatggcggaatgcttctgcatttacggtgacgaataatgattgtcgaatctggccgcgctgccgtctggcagcatgccaaagaggctggcattagtgacgatatcgtgatgatcgcaaagtatttcgatatcaaggatatctccattgtgttcaatgggaaatttacctatcttcatgagcgcccactgaagcgcacgcgtatagcggttgcgacgcgagcggaggccgacgcgctgaagatgttcattaatgagtcgaagcagaccaaaaaatattacaagtagcgggagtgttgagaatgcgatatattgcgatcctgattacggcggtggttctcactatcgcaatctttaactacgcaattcaattgggataaattatgcaacctaaaatcacagacgaagaatttttagccgcccgcgaagagggtaagacctaccgcgagatcgccgaagagttcggcatgaacgttcgcagtgtggaacgtcgcggcgttcgacttgcccgccaggggcatttgcacggtaacaaccacgtagcgaagcacatcccggacgggttcggggtcaaaggcacatcgaccatgattcgcgcgaatggtgacgaagttgtgcgctgggtcaagtcagaagtagaccgcgaccgcatgatcgctttgatggaggcggcgcaagcatcattctgcgaagacctaccgcgcgctgaaccgcagccgaaggatgaatcgaagtttttcattgaagatcagctcgccctgtatccgatcttcgatttgcacatcggcgcgatggcccacaagcacgaatgcggcgagaactacgacaccagcacagccgaaagggttcttaaccgcttctttgactattccgtttcggttgccccgcagtcgaaaaaggcggtcttgctggtcggcggtgacttccttcacagtgacggcctggatgcagtaaccccggcaagtggtcacgttctcgatcaggatagccgttacgcgaaacttgtctatgtggctattcgctccttgcgccgcgccgtgtcgctactgctgagtaatcacgcggaagtagaggtgcaggtaatcgaagggaaccacgatcaggctggcatgatctggttgcgtgcagcgctcgcagcgttctatgaaaatgagcctcgcgtattcgttgacgtcagccctgcaattctgcatcgcaccgtgtggggcaaaacgatgctgggctacactcacggccacacgatgaagaaggcagaaacgcgcctcgccgcaatggctactgacttccgcaaggaatttgggcaatgcgactacatctacacgcattcgggccattggcatcaccagaccgtcacggagcactcgttagggattgacgaagtacacggccagttaggggccaaagacgcttacgccgctcgcggtggttggcgctcctatcgccaggcggcggttattctgtacagcaaagaatatggcgaagtaggccgctttatctaccgcccgaacatgtaatcacaacggccccgcgaggggccaacaaggaaaaccgatgaatagaaatatctgcattttcgatctcgatggcacgttgtcaaatggcaaccaccgtttgcacctgctgccgaaaaaagatctccacctaaccgaaagctggacggcgttcaacatggcggctggcggtgacgctcccattacggacacgatccgggtaatgaaggccatgcgcacagcgggatttatcgtcatcatcctgaccgggcgaagtgatgaggcgcgcgagatcactgaaaaatggctggtgcaaaatggcgcatcgcattacgacctgctgattatgcgctccgcctccgacaaccggaaagatacggttatcaaagaggaaattttacgcaagattggcattgagcgaatcgttgcggcgtgggatgatagccccactgttattgcgcacttccgtagcttgggtattacaacttaccaggtctgcgactacggcgaaaaccttcacgatcatctgaaatctcatggagtagacaaatgaaaaatgtaatcatcctcaacggagcgcctggaatcggaaaagacaccatcgcggaaatcatcgcccgcaaatgggagtatcggatcctgagtttcaaatcaccgatgtttgacattgcgcgcgccatcctgggtgcaaccgactttgcccgcttcgccgtccgttaccacgaccgcagccggaaagaagtaaagtgcgactttttaggcgaccgctcgccgcgtgaattcctgattcacattagcgaaaatttcgtaaagccgacgttaggcaaaaagcagttcggcaagttgctttgcgattcatcgctggtttcgccgtttaattgcgttgtcagcgatggcggcttcgatgaggaggtggagcacgtcgcattgcatgaggcgcttaacgtgtttgtcgtccgcctccatcgtgacggcatgactttcgagggtgatagccgcaagcatattagccgcccggatctgatttgcgaaacttatcacgaattcgattttgatatgacgactggcgagccggaagacgacgcgcaaaaaatccttgatatggttttcgaagggtattaatattctctacgtaatgcctttattatcaccgccttaaactttgggagccttaacaggttcccttttttttgttctttatttggcccaacgcatatatcatcgcattatcacttaactaacagaggttgcatatcatgcgggaattcatcaacgcggcaaccaatggtagcggcggtgttaccctcgcaggctctgcgaccgggcaacttatcattgcggccattggtttatttttcatgattctattcggctcattcggcgcgtggttgcgctggcgagattcaaaggcgctgcgtgaagcgctggaagccggggatatcaaaacggcggtgaagatcaggagtaaataacatggggattaaaacgcgggttacattcgcggcggcgatggcgatcgctgtcgccttcctcccgaaagtggaggacacgaaatacaaagtttataccgatatcgctggcgtttcgacggtctgcgaaggcatcacagggccggacgtaatcaaggggaaaacctatacccggtcagagtgtgatgcacttttggagaagcacatccaggtcgcaaagcgtgtggttgacagcaaaatcaaagtggccgtgccggacaccttccgggcgtcgatgtacagcttcactttcaacgcgggcggtggcgcatactccggcagcactatgctgaagttgacgaaccaggggcggctatatgaggcatgcgaacagctttaccgctggacgtactatcgaaacccgaaaacgggtaagatggaaaaatcgcgcggcctgcataatcgccgggatcaggaattcaatctatgcattaaggatctaaaatgattaaggtaattggtgtggctcttacggttgttcttctgtccggttgcgcttccagcgtcccgatcctttccgatctggtgggcagcaagccggatatgacggcgcaagtcggcgcggagaacgtcaaacaggcggttggcgtgacgaacaaaacggacacgtcgagcaagcaggaaaccaccttcaaagaatcggcagttggcaaggttgatacttccaacaaaaaggcggtgacgacctccagcattcacgcgaaccagattacggcggagaagatcgagatccgaaacgacgatggcggaagcatgattccgtggctgattggtgccgttggggtcatcatgttcgcggtcggtgttttcggtatgtggcgagagcgaaaaaataaaggggcgtaagccccttttttcatatgtaccgtttgacgtgcagcagtgccacgccatcttcatcattcaacccatgttcaaccgtgtttgtcgcggccatgccttgatatagcaaggtgagcgcggcacgcaagtaattttctggtgtgatctgattcacgcaaacaagcctgtgaacctccgttatcagatcttccacctgctttcccgaatagggcttcatcgtcgagttgctcaatgtgcatcatctcccacatgtatttgttgtccatcccttcaaacgaccggaagttaaatccaatctccctgttatccgggccagtacaccacaccacgccgttttttccgtcaaggtatccattcgtatagcttcgcgctaaaaactccttagaaaccattgaggcgaacatacggtgtgacacgttggcagcttttgccatgcgtggcgattcgcggtgcatgtaaacgaactttgcaaaatcttgccgggtgaattcccggcgagactcgcagaatcggtaaatgtcaaggataaacattcatcacctcatgaacgaaggattaacgaacacttccgaatcaatcacgcagacgaaacctaattcctccatcttcggcagcaatttttccttaatccttttgctcaccccggactgacctttgaagatcttcagattgcggcacgcgttatagatgctctgaacagtcatcacgcctttcgactgcttgcaacggctggcgataacatcgtacacggccttaatctccgcaccctcaccagcaaagccggacgaatcagccgacgacaaatacgttttgctcaactcatgaaacatgatgatggcttcgtcgatcgtttcggttccgatcttcttcgagcgtttgccgccaggttgccagtttcggatcgtgtggattaccgacgccaggcgcatcacctgcttatcgaatttacccatcgcaccgcgcagcatcgtatgcgaatacttcccgccgtcgcctaattccggctctaactcctggcgtgccttgttcagccgacgcatgcctgcttcagtcacttccagcttgatataagattccgtcataatgtcatgaatgaggcggaagtaatcagcgcgtaaagacttgtcgatcggctcataggtcgaattcccgttttcgtcaatgaacacacgctcacctaaacgcgtttgctcgcgaaccaaaaggaaacgctctgatacaccgataccgcgagaaccagcctgcatgatggcgtcgatggtttcatcctgggcgattacgcaaatacagcccagcgcgacgaatgacatattgttacttacgtcggaacgtgcgatcgatacgtggcccttatcccacgccttcaacaccagttcgctgttcgtcttcttgccgccgtcgttgccatacgtgatccctaacaggctattaaccgccgtcgcttcatcggagataaccgcaaagttgccttgccgattgttgattttcgccaggccttccggcgtggtatcggaaacggggaacgtcagatcgcacatgctttctaacttctcctcaagttcgtctttgtcttcgaacagtttcgccatatcggactgcgacaactcgcctttcatggcctgcttgttggcggacaacttcgccatgattttcttgcgctccttcttgcgcgcctcgttgattcgctcaacctctgcaacgatcggatcgatagccagcgagttaatcgcagacttaccagcggaaggcggctgcgacgtaatgacgtaaagcgtcgtcggttgctcgctgccgtggtactccacccaaaagcgacccatcatcgcggcggacactgttccgaggaaatgcatataagccgatgattccgggaattgaacggagcgagcggcattgagcgccagcttgccgacgatatcgtaatcattcgcgatcgagatcgtgggatacttgtccgcgtttacgtcgatatctttcggcttgggccagaaagaaacggagtcgcgatacccgttcgcacggatggctacgcgcaaagggctgatgccttccttctctgcgatggcaataatatcttgtggggacacgcggtcatttaaaaacatgccttgctcctgattggttaatcgtgcggctaatgataagccgtcttaaatccgagatccagtgataatctaaacgcacttgcaaaatgtgcttaggttatcggggcgcatggccccgaatccgttacaggtatttcgcctcaaacgttgtgccgtccgacacgctgaaaccgacttcctcacggtagagcgtccagcggcaaccgtcacggtcgaagatgtatccggcgacgccgcccagcgcacgaccgctttccacctggtaacgcttgccgacggtgaaggattttttcaccgggtttttgtggtcgaggccaacgcatttcagggttttcgttttcagttcgataaacgtcgccaccaccacgccgccaacaccagcaataaacaactcaccactaatgccgaccgacaagtaaacgcgcttcttcttcagttcggcgctgttatataccatcattgacacgttgccttcgtcgtcaatgcgagcggaataaaggttgttttcctggatattaacagcacggcttgaggtgcatttaattttgattgactttgccattttatttcctttctcccatttcgatatagaggtttaccagatccagaaagtcggatttgtttctgcaactcaatttaaagccaacgtgcgattcgatcttattttgcatcgcctccatcgttgcgccgccgttattcatcttcagaacttcgcggcatacgtcagcaagttttttagatatcatatttcaccaccgtaaatttagtgtttttgcaagcgccttcgatatcgctaattaggcgattcactctgatattaatcatcgttttgtggtgcatgacgtcaacaatcccacaaacccacaagatcatgattgaaaagataagagcaccaggcccatgcatagaaaatagtgcggtcattactgcgatcgtgaatttcattctggttttctccgttgcgtttcgatggaataactatacccgcaattaagcgggtacgtttagcaattcgtgctattcattaaagttcgcctggaacacggcgcgagcgaatccgcgaggagtgatagagcgaagcatctttgttctttcagacttgccgcccaggaatttccacgcccaaaagaaatcgacgccttccacaccttccggcggtaataaacgtttcggctccacgaatccgttaccgtgccagatgcacgttttcttcgtgtaattgtcgcagtgcggcatttttgggtgccaaacttcctcatgcggcgcaacatacccgccgaagtcgcgagggtggaaataaaaatccggcttgcgccaaagcgtcgataatttgccaaccgggttttctaccatccaggggcaattatattggtcgcccaattgctcgatcatcttcgcatcatcggcggctgatagaacatcctgagtctgccgggcgtgcttaaccccgctatgcgctaacagcgtgcaggacgggaaagcgaaaataatgtcaggatccgggatgcccaggatcgtgcgcttcacgtcgaaatctttgtcaatccacatgttgacatactggattttggcatgctccatgcggattttgtactcgccgtggtcgccggaatcggcattgaagcaatacacatcgcaaccgcgaattgcccacggcagacccataatcccggaaccgtcaaacatgcaccacacaacgcgctttttcatcgtcacctcaccagaaagggatacattcgcggcaaccttcttcaccagtgcagccgcaactattttcttcttgctctgccagatcgtcacgcatcggcagactttcggcatccatatccatactgcccagggcatccgatagcgtcatttcctgattggctactttgatgcaatattcgcggttaagacccgcgtcctgggcggttaagaaacggtgccagtaggcatcgtcgtaattatcagccattgcttttcctccggttaaattctcgcaaactggcggcgcatgacttcgaacaggttttaccccagccacgtttaagatcagccgccttgaccttatagacggccccgcatcctggagcctcgcagcacttcatgctttccttcgccacaatgtgatccggtcgaccagtcagggagctatcgccgggattcttcgtcgaccagaacagttgcactttcgcgacctcctcgccgaattcattaacgaacatgtaaacgcccttgcttttcagaagcacggtgcaatgatgcatttcgccgttgacttccaggtatgcgcgatcgccttctttcattagcttctccacgactcaataaacatgctgttcgtttccagcgtcagcgtgacgccagccagcgaggatggaaccaggcgagcgcccggaaaggtgccgacaatatagcgaccattcgatttggtgatcgtgatctgagtaaagccggattcgcgattcatgcggagaacaacgcgaccgtgcgcatgcaggacagccaggatcgaatcagtctttggatggttcatgttttatttcctcgttttgttggtgtggggatagtatgccaccatcccccaatgatgttttagcaattcgtgctattcgggaacgcaggtcgtgtaatcctggcagatgtagattgtgcgctgagtgcgcggcgcggcatcctccaggctctgaatctcgatatcgttgctgtcgacccggcagggtgttgcaccgaagatgaaataccccgtctgcttgtcgttgatttgccacgccttgcttgcgggatccgtattgacgacaaacggcgtatcgtcggctttgaagtcttcagggtgacgcccgtaatagtggatgattgcagccgttgccgctgccttaaacttttccgtcacgtcacgcgctgcgatatcacgcgagatctggatatcaacatccggcgcgccaaccatgtaggaaaagctatttgaaatggtaagtgttctcatttagattttaacctcgtttcggtggatgaagtcggcgacgtaatggcactcgatcgggttttcgatcccggcgagaacctcacagcgcccgttgttcagtaactggcagtgctggcaatccacaccgccaacattggctatgacgatggcgatcccgttgcatgaaccgccgaacattcggtgagggaaggggtaagcctcgcaggtgcaaaccacctccccggccctccgctttctcatgcgctccccttctcgatgcagaaaacccaatcgcgagcatcaaccgcgaagcgcgccacgccgtcgagcacgatgaaaacggtctgcccgttaacacctcgccccttctcgatatcggtgacggtgcggaacaggtcgcttgcgccatattgaattttgtcaccgattacgacgtcgccaaatgctttcatgttgattctcctgattggtttcgatggggtaatgataccaggcctcgcggcccggtgtttagcaattcgtgcttatttgatgccttgagcaattttatccattttgcggaaccaaattgccagttcttcgagcatctcgaacaggtcagcttttttgctttccatgatggcatcacagatcaggttgatatcgcaagccatgactccgaggtattcaccgtaagcgcgtacacctgcaatgttagaagacttgctatcacggcggcatttctgcgctttgtaaatcaggctcatgattttggaagtttctttggtcaggatatgtacgttgctcatgatgttttcctttttgcttgcttcgtttcgatgaagtaataatagcaaaagcccacgcggggcttttaacaaaaagtgctatttacaccaggcggtaccgaacttcatcaccgtaaatcacggcctgaatgtgatcgccaaatgtgacggtcgcgcgagtggtttcgtactccgtatgaccgtatcgccatatccctcgctggggataatgcgccgcgctttcgtgccaaatgttcatagtgaactctccagactccccgaactccaggcactggcctaccatcgctttgacggcctggtagtcatgccaacgctgagtagcacggtcggtaacgcgctccacatgcttgcgctctttgtgctccgccgcagcctcaaccacggcccacttactacgggtaaatattctcatttgcattttcctcaaagtcggcgcggaattgcgcagcgcccttaaaatggaaccagtcacggtggcatcgtctccgttaatagccctacttcacctcgaaaacgattccgtcgcaaacgcacatatcaaccagaaattcagttgcagcgctgaacgtccattcgtcagatcccggcgtgcgcttcctgatcacgccgtcctcgttcttcatccattgcacgccagattgacggctttcatatgcaacaccagttttcatgattattcctcaacggtgaatttaatcggttctttccctgtcgccttgcgatgggagttgaccagcgtttcgaacttgccgatgcactcacgcaaatctgtgaacgtgctggcgctccccatgacacgccatgattctacattctgcccgcgaacatagttgatgacgtgcttcatgattttgtactggtcgccatcctttttggtgtacacgtgcagcactgcgatcctggttgatttgtaggcgaatgctttggtgatgtatttgcaagtttgcatcgtgttcgctcctgactggttgatgtgatgactatacccgatcccaccagcacgtttttgattatttgtgctattcctccgattgtcgattattccaccgattcggaatagtggaataggctgtgattgcatctgattacctggtgattacttttgacgattcatgattgattgtgattgtttcattctgtgcaatgggatgatggagtgtttcatgatgtgcaacgaattgcatagatgcatgcactatgcacataatttgccgttcgaatcctgccaaaacggttgccagttcacagtaacctaatccagttcacgcgcagttcagtaagataatcttacgtaaaggttgatcaaaaagtgcgcagcataagcacataaatatacatataagtatatgataaacttaatattattattattattctattattctctctatctgaatattccagttcacgtaagatagtaaggagatgcgctaccattttcgcttgcgacagcctccaaaaaattcagtgttccgcgccgccagggtatataggagggtaggggtatatcttactttcttacgcaaactgacttgacgccttgatacgcctggcttagtatgcttactgaattgtaacgtaagtggagagaattacagtgaacaaaagcgaaactgaacaaaaatgggagtttgaacaggtcgatcccgaagtgtggatgacctatccgccggataaacaggccgcttatcatgcctggctcgctggcgatatcttcggcgatgatgatgaaccggagccggagcgcgagcggaaacaggtcggcggtaagcgggaagggccaaccatccaaagcctgattgagcaggattttattgatggcggtctatccggtaaggtcgacgtcgaggcgttcagcgccacgcatggcaagcagatcacatcgcacgccatccggtcggcactgaagcatcacatcggcaaacatggcaagttcagaaccaggacgcgcgacggcgtgatcgaatactggatcgaacgcgatgaatcggcgattagcagcgatgagcaaatccaggcagaccgggaacgggttatcggaatcatccacgcgctgaccggaaacgatcttgatgtgcgtatcgaaccaatcacggcccgcgtgcttatccaggctatcaaactgaacgtcaaagcaggagatatcaagtgaaactctatcaagaccagtccgacccggcggcaccaatgcgcctgtgaagcgagccagtaagcgagcaggacgttatcgacgcggtaatcaatgcatcacaggccgaaaatatgagcgccttagaatgcgttacaggtgacttgcttttgatgtcatttcttccagattctgagtcatacatccagcacgttaccgaaacgggccaggcagtgacgcgaccggagttcatcggagcaccaaacgtgcttcagatgatgcttgacagcgccgacaatatcgttagcctggactatccatcatgattacgattatcagctacgtgattatagggattgtggttggattgctcgccgcagcagccatcattgcaatgtcgatgaaatagcactttttggtaaaacccggtcagagggatcgggcattatcaccacatcaacaacgaaaggagcatcaaccatgccacgatttaacagaacgcttcagcttcgcaacttcgctgggcttcagatcccgaaggagtcgacgaaggcagtgccgggccgtgaattcggcgtgtacttccactggcagggcaaatggcgctttaccgtcattcgcggcttttacgtcacctgcgacggcgttgacattgacgaccacagcggcgggaaccaggttcacaacttcaaatagcactttttgttaaaacacgatcggggtggcttgctatagttaccccatcgaaacgaacaacggagcaccacaatgaaatctcgcgaatacctcaacacccttaatggcctgatttactggctggaagatgaagcagtgatgatgcgcaagcgcgaaggtacgatctcgaagaagtcgaacatgacggctgaaatcttcttcgcgatggtctgcaacgatacactgattctggttgagccggagccggagcaaaagagcatgaccatgaacgaattcactaacttcctggctggcatcgacaaaagcaccacgaccgcaaccgcacaggcggcaatccagggcggggccacccacattgccatcgacggtaacggcgacgtcttcgcattcaagatgcgcccgcgccactgcctgccggatgacggcgacgcgaatgactacctgggcgaatggcttcgcgggtcggagcagtacggccacattgcgcgaacagtctgcttcctgggcaacactggccgcgagcatcgcaactggcgggaactctgcttccagatcccacggcaatagcactttttgttaaaacgcagtcggggtgatgcgctatcattaccccatcgaaacagaggagcataaacatgatcggcaaccaaaacaacccactcaatgcagcctttcaccgtcgcgcggtcgaacaacacttccacgcgctgaaggtggtgtgcaacgagatgaatcttatgcttgacctgccgtcatgggatgcgcaactggaagattactatgatggcctgcgcgctaaacgggatggcatcattacccgcctgcgcctggctggtatgttcttataggagaaacaaaaatgcaacaattcgaatctcgcggcaagacctacaacctgccggacactgctacccacgccgcacctggcgcatgcgtcggcctgtactttaaggatggcgatagctggtacttcatgggtgatgtgattggggacgtcccgccgaagaaatgcggcttgctcctgggcttctacgatcacgacgtggtggagttgaagccaaagcgcgtaccgttcgccttctggaataaaatcaaaggggcgctgttcaaatgagcgacccgaaactgcaaacggtatgctaccgcgattcggatggcgatgaattggtcgtgtcgccgttcagtggtggcgctgctggcgtagaacttatggcgacccacgatagcggttgctgcgtatttgacgacccgaaggtaatccgtgatctggctaatcagttgctggccgtcgccgatgccgtcgagaacgcacaaggagcggaagaatgaaccagttcgaatatatgcatcgcgcacataaagcgcttgccatgttagcctttcacctgaatatgaaagttatatccgtgaccattaaggtcgggagcattgagatctgcggattcgtgggcaattactcattcaccagaacttacacgttctcatcgctcgcctccctggagagtcaggcttatggcttctaaacgcaaattcaggatcgtgcgcgtggcgacgtttgacgccttcgggcgtccggcggagtggtatgcagcgcaacggcgtgttgccttcttctggtgggtgacggtcgagcacttcggccagttgacgcaggccagctactggctacacaaatccggcgcacccaatcgaccggagcgcgtaatcaaggtgattgaatagcacgaattgctaaaactcgatcggggtaggctggtatagttaccccacaccaacaaacgaggcagtcaccatgaaattacgttgcaccgattccaacactatcaactacacccctggctttgagtacagcgcggagctgggcgttaccgtccgcacccctcatggctcgatcggctgcgatgtggttcatggtaacaatacctggttctttttcaacaaatcaaccctcaccgccgaacgccgtaatggttcggttgtggcaacctttaaggtgatcgaataatgaccaacgaaatcaaatcaggcggcaaggttattgccaccatcacgcagcgccaggcgatcgcgtttcagttacatatcccaggcgctgaagaacccatctacgtaccagcctgggccaacacggttgccattgatgaagatggcgcgatttgggcttatgagtcgatggccgaagatgtgcgcatcgtctgcgaggagcataaggcctggagcgattggggcaaggtcgaagcgaacatgcaggaaatcggagaaatgccctgcgtccctgactggacagaagcgaaaatcgaccttcgcgccatgaaatagcacttttcggtaaatgcccggtcaacggatcgggcataatcatcccacaccaacaacggagatttaccatgaaacactttatcaaaaacgcagtcgtcgccatcgtcggcaccaacttcgaaggaaagaaaagccgcattcaccttttgcactttggaaatgatggcgaaatgcgcggagctttctattacggcgagcgcggggatcgccttcacagtgacgcgtattctgttcgccagttaacagttttccgagaatgccgaactcatcaagagtgggatgctgaatacctctgcgaagggctggtggtcgaatcgttcgttgccgatccggttaagctgacctcgcgcgactataagcgcatggcccgtaaggcgcacaaactcatgaagcgcacgccgaaaagccacgtgtggcacatcttcgccaaccaactgtgagatctgacgcgatggaaaccgtaacagtaatttgcactcatgctggctacgggccactggccccgctgttcaccgttggcaaggagtatcaagccagcttcggccccggcctggatgaagtctggattttgcaggacgacaagaaaacaacggagttgggcgaaaactggctggcgtgccgcatgccggatgagaagatcgcaatgtttcttaaccgaccatatgaaaacaacgttttatttgaggtgaaactatgagcaagaaaatgattgcactgtattgggttcttttcttgggtggcctggtggttgccaaagaggacggctggcaaatgatcggaatgatgatggttatcatcggggtaagtcgcctctctgagattaacggcttccgccgtggtcgccgggccgcattcactggcgaaaaagaatagcactttttgttaaacctgccgtaacgtcatttggtaaagtggcgttactgaagtgaaacaatccaatcaggagcaacgcaatgaacgataatttaatcgcactgctggaagagctgaattcctacggctgcgcatacatcgagctttcgagcgaacacgttatcgaagtcatgattgacgatgacgccgggttcaccaagttaagggtggctaccggggccgaagaggaattcgaagactgcggcatccgtgaagtaaccaaccttctcgaagttcaccaggtgaaggagatccgctaatgaacaccgtcaaacttatggttgtcaatgcggcccgcgaacgtgagcgccagctaatcggctgtgtattcgatgccgtcgaggtgcacgaaccactaggtacggtgcacgtaatcaagggcggataccttaacgaatttatcgtcaatccgctggatactgacgaagatttgaccatccgtgttggtggcgagccggaaaacgcgcttttccatctgcggaaagtatcgaaggcgtcgcagcgcaagttgctggttcgtgcactgaagcgcatagcgaagcagcgcggctacaccgatgcatacatccgcaagttcggcacgttcgcgggcgcaggcgattgggcgcggtcatgggccgactattatttcaacaaatccggcgaattttgttccacccatacggactggctgcatggaacggaacacgatcccgtaaacggccacgagtggtacgaattcattgaggcggaattagacgccctatagcacgaattgctaaaaccgccgtccggggatggtgcatactatccccacaccaaccaaagaggaaaaatcatgagcacctacaaattcatccttaccccgaacgccgattcccccgctggcgtgggcgcgaaattcaccaaaggcaagcgctatgatgccgagcatttcaccaactacaatggtgcgtcgctgtacaaaatcaccgacgacgaaggcaacatgtacgcggtaaacccgcgcaactcgcactacatcggcggcggtcagttcagcatcgagttgcaaatcaacaactgtttcgctggcggcgaactatccttcggagggttagttagcgatgcgctgaaataccccttccacacttcggcgtcaatgttcggcggcgtaacctccactgagtcgccaatgttctttgccgacctgaaggcccacgaacgcgacagagatcgggatctggaatccctggccgaccgcgtgctgaacatgttcgggcgggatgagtcgcggggcgttgtgcgtggatttaagatcggcgctgaaaaatccgcgcacttcaaagagggcgtgaagtcggcaagcgatgcggttgcagacctgggcatgctgtcacggtcggttatcgtcgggagcgcgaaagaagcctcgctcgctgaccgggttaaagagcttgaatcagaactcaacgccgcccacaacacgatcgagaaaatccgcgaagccatgcgcacgccggaaggtgaagacgcgcagacccatgcgaaagttctccgccagatggccgacgccctggttagtttgtggcgcgacggcaaatagcactttttgctaaaacttccgcaaggccatttgatatagtggccttattgaagcgaaccaatcaggagctaaacaaatgagcattccgtatccgaccaaagacaaatcattcctgggcctggccgttgttgagattatcaacccggacgtgaccaactcaccggatgagcctacccttgcacagtgggccggattcaaagcaggtgatcgactgaccgtcgaatgctatagcgacggcgagaagtgggcgcaggtggggcgagactaccacaccgaagaattcggccaggtactccctaccgactggttcaaacttaacaaaggtgaatacaaggtgatcgaagaatgaacaacaaaatttgggtgctaacctatactatcgggactaacgaggggcgcaaatcgcgccgcctcacctgcgacacgaaagcgcaggcggaaatgcagcagcgcgtgctgggcggcgaggtggtcgaatacatccgccagccggaatccttccaggtcaattggcctgagaagatggacgttgacgccgtgctgcatgaagtgcgccagatgcaaaacgacccggcggcgtggaaagacctgtacctttgcggcgacactgagtcagtccgtgatcccttccgctttgttcggcaggcgcacgcggaatggtctgatcgccagttcggcaacgttggcccggtcggcccgctgaaacacctggctaaagaggccaacgaagccgctgaagcgccggatgacattagcgagttcgccgatatcatcatgctggtgtgggacgcgacccgccgcgccggaatcaccgatgagcagttggcaatggcggtggcggaaaagctggagcggaacaaacgtcgccagtggggagccgttaaagatggcgagccgtgccaccacttgaaaaattaacgaattcgtataccatttaaagcgcctgtaagcgattctggcgggcgcaaattttactaaggtgattctatgtctgagttctcaaaagtcgaagatatgccgattggcgcaacggtaacgggtatccagatgagtgagtcggtcgatacgattactccgctggcatttccggttacacaggttgaaacagacagcaagaaaggtttcatcttcatctacaaaaatttcaacgcccctctgcgtgtcgagatcttcattgctcgcggaacatgggtcgaatgggagaaggcttaaatgttcggactgaatgaggcgcagtacaacgccgtgaagcgcgtggctaaacgaatgacggcggaaactaaagacgccatacggaaagacaaaaagacttacgatcaggttgccgcccggatgatcgataagcattgggccgaagtcaacacgctgttaactcgcggtcagtttatctggctggctggctatctcgaaggtcgtttcggtcgccgtgatggagagtatgagtaaaaaataagcgaacgaatcaaccgcctattgacgcattcacgctgaccgggtatcgttaaagcgtagacacaagaggcggtaaacatccgcaagtctcgccccgcttcggggcatttattggagggtaatgatgcagtacaaggtcatactcacagcaaggaaaatgggcggcttttgcaagtcctgcattcaagagttcagcatgacgattgaagcgaacgataccgccgacgcggtggagaaagcaaagaagcgttcaggcgtcaacctggatacgcataaaatcaacatcaactacataagggaagtcaatcaatgttaactctgattattgcattgttaatgctgttcataggctatcacgttggcgcggctcatcttgtcgagcgcctttcaaagcgggtacatgaggcacatttgcggccatgatgtacaataagaaaacggcacgttgggaaaaaattggcgatccggatggtatcgcaaagcgaattgccttttcgccgcttccgtatgttgactgcgagccgtttgtgaaactccagaagacgctaaatcggcgaaacaaactgatgtgaacataacccgcttcggcgggtttttttgtgcctgcaatctggtatactcgcaactcaacacagaaggaggattaaca

SEQ ID NO: 32 - DNA, 48293 bp, unidentified
  source 1..48293: mol_type = genomic DNA
atgagcgataaggtgaaggtgacgacgccgcgtaatcctggaggcaggccgacaagttacacggaagacttgcccgagaagttgctgaattacttcaacgtcgatatcgacgactacattcagcacacactcacgacagccggtaagagcaacattcgcatcaacccgaagtacatgccgtctatcatcaacttctgtaatgaaatcggcgtatcgaaacagacgttccatcggtggagagctgaacacaaagagttcaatgacgcttacacgcacgcgcgcgagctttacgagcagatgattctgaatattggcttcgccacgaacagcactttcgccaccttcatgctgaaagcgaacttcggctaccgtgacaacaccgagatcgtggttaccggtgacgccaacaagccggtgcgcttgaaaatcgtgtcagagcgcccgaaggagcaggagaagccgaaggatgaggccgaggccgtagattggggtgatgattaacggcggtaaatactgcttgacacagcatataattcagaacgaatatagggccgggctaataccggcctttttaacgtaaggaaatactcatgaccaaggtactaaatttcacctccgtagcagccgcgccagtcagcgagcgcctcgcctgcggcctcctggattccggctgcgttagtggtctggagatctcccgcgagatcaaaaaagagattgcactcctgagagccgatcagcacgtcaaaatcaaggctggctcactgtttgccgtcgtggcggatcatgaataccaggccaggaagttaacgcaggcgctgaacgactacgacgacctgtccagggcaaagcagcaggtcgatgaagctcgccaggagctgatcgtgaaacttagtgagtgggaagtattcggcctggatatgctggaacatcaatttaaaagcctgccggtcgtcaacttaaagccggaagagaagcgccagcgaattgagttcaacattgctgaggccatgcggcagcttgaagaagcgacgaactgtgtagccgataaggatgcgatcattcgcaatatgcagcgggtcattgacgatctgcatacatcggtcgccaacctgcaaaagcagaacgacgaagtggtgcatctcaaccgcaacgcagcagatgagatcgccttgctgaacaaggctaatgagagcatcaataaaacagtcgacggtgtggtgcgccagcgtgatgagctgtgcagcaagctgggtaatgcaaggctggagatcgcagaccttaaacgccgcttagatggggaagtgaagcagtcggccgacgtttacgaaaacatgcgcacccatagcgaggccgagcgcgaaaacttcctgaaacgtatcgcggtactcgaaggtgagcgcgatgaagcattcaacctcctgaacagcgcaaagtcggaaatcgccaactaccagcgcctggttgaagacctgaaagcaggtacagccgttgaccgcgatacggtgaagcgccaggaagaaaccattcaacgcctgtatgggatgctcaacgactggcacgattgggcgacagacgttatcggcagtccgtcatccatgggcgtcgaagcgcagcgcaccgcgatcagtgaggcgatgaagaagcggcaggcacgcattgacgggcaggattcagccatcagggcgatctcctaccagcgcgactcatggttgcagtgggcgaagcagttcaccggcaccgacaaggccagctgttcggagctgttagaactggtcaaggcagaagtatccagccgcgagaaggcgttctataacaacggctacctggctggcaagatcgcaacgagcaaaccaaaaagccatgatacctggagcattaaaaccgacgggcctgcggtcatgaatggcacggtaaaggtaggcggcgtcgctgcccgagctggggccatgatcgagaacgcggtagtgatgagcggcagtgttaaggccagcaaggtgacatttagcgatgagatgaaggccgccatccgcgaagtggttcaggccgtgatggatgaagcgctcaaacaatccattcataacgaaatcaaaaagctactcaaataatcaacctaccggcccctacgggggccaatgaggccaaccaatggaaacctactacctaatcatcagcgccgttctgtgcttgtcctgcttcctctgctgcaaaggatggtcaatggccctgaacatcggagcatcgaagaccgacaagcgtatgctcaagctggcgcgaaccatcggcatcgctggcgacgtgtttcactgcgcctgctggctgttcatcgccgcaggcttcctaaaagccttcggattgttctgatcctgcataagcacggttgccgccgagcgtgtccggttgctaccctgctggaagtgttgagtcagagggctgctgtatggggatcgtgatgagtgtgtggttggcgctggtaacagctatcgcaatggttgcgatccatatggccgcaatggatagggagcggatgagaagtaatcccgcgagccagatcatcaagctggccctggctgtgttcctcctggtcggtgtcgcccacatcgccacccgttatgctggattcatccgcgtactctcttaggctcactgctgctatcatggccccgttacaacaacggggctttttttatgtcaattcagagtgacgccagtcaatttatcgatctaaccttaacgccgccacaaaatgattttttgcagctgtcctgcaaacacccggcatttgtggcaggcttcggcaccggcaagagtcagacgatggctgtatcatctgtcctcgacgctgcggaaggcggggcggatgttaccgtcgccatcctggagccgaccttcgacctgtgcaagctgatcgccgtccctcgtatcgagcagatcctgtccgagctgggcatccgctttaagaccgtagggaacaaggagatcttcacctctcacagcgggatcggtgacttcctgtttcgctcaatggacaacccagcgcgcctggttgggtgggaggcattccgcatccattgcgatgagatcgataccctcaagaaagaggctgcgaaggcagtatggcgagccgccatcggccgctgccgacaaatgccaaaggactaccagccgtttgacttcctgccggatgatcgcccgctcaaccgcgtaagcgcgtactgtacgccggagggattcaacttcctgtatggccgctgggcgaaggacaaggagcgcagccgaaaggccggttatctcatgatccaggccgccacctcatccaacccattcctgcccgttgactacctggacgccctgcgcgccagctacgacccgcagcgcttcgaagcctacgcgaagggccagttcgtcaacctgaaatcgggcacggtctataagaacttcaagcgcgagctgaatgacacagacgtggagatcatcccgggcgagacgctgatcgtcggccaggacttcaacgttaacaagatggcgaccgtcgtctacgtcgagcgctatggcgaggatgggctggccgaactccacgctgtggatgaacgccacaacgggatcgacactcccgacgtcatcgcctggcttgtggagaagtaccagaacgcgggcaatgggtacatccaccccatcgagatctacccggatgcgtccggtggcaacaccagcagcaagaacgccagcatgtcagacctgtcgatgctcatgagcgcagggtttgacgtgtactgtgggcaggccaaccccgcggtgaaagatagggtgatcagcgcgaacaccctgttctgcaacgccagcggccgccgtcggctgttcgtgagcagtaagcgctgtccgcaatttgtcgaatgtctggagcagcagatctacgatgacaagggcaagccggacaaggaaggcgggaaggatcacatgaacgacgctggcacctatccggtggtctataagttccctgtcgtgcataatggcacgatcacggctaataacattgaatgggtgcgatagtatgacgatctcaacattgccgcaggcgggaacggtatctaccgaacacccgctttacaagcggtttacccaggaataccggacaatcgaggattgcattgctgggcaatctgtcatcaagcgcgccggtgtcctgtacctcccgaaaccggaagcgtggacgatgaagcgctacaacgcttacaagcgccgcgcccacttcctaaacgccacctaccgcacacagatgggcatggttggcatcgcctttgccaagcctgctacctacacccttcccgccggtgtcgaatacctgtcgaccgatatcgacggcgaagggctggacatggatcagctggtgcgaatgtgcgtatcgcagaacatcaccttcggtcgtggcggcctgctggtggactatgacgcgccggaggactccgggcaggtgacgactctggcgaacagcggccgggcgactgtccgcatgttcgaccaccggcagatcatcaactggcgcaagagcaaaggcaaatacactctgatcgtcctgcgctacctggacgacgtcgactatgacggcttcgagcattaccaggtcgtccgctaccttgagcttcgactgatcgatggccgcgcctactcacgactatggactgacgaattacagggggctggcggcctgcccgcttcggtgatgcaaggccagggcggtgacatgaaccgggaagagccgcagctacgccccatcaaggcgcgcggaaaacatctcgactatctgccgttctgctggttcggcagcgaacgcaacgacagcgagatcgacccggccccgctgtcggacattgccaacaccaacatcgcgcactacaacgccgacgctgacaacaccgacagctcgtttatctgcggccagccgaccttcgttatcgccggggttccgcagaacttcaagaaggacaacccgaacatcaaggtaggcggtgatgaggcgatcatcctgcaatccatgggaaccggcacgccgagcgccagcatggtcgtagcaccaccgaataccccggcgtcggcgctgctggagaagcgagagaagcagctggctatgctgggtgcgaagctggtggagcgcaacggggcgacgaagaccgccacccaggccggggcggatgagaaaaccgacaactcgatcctttcgcagtgcgtcggcaacgtcgaggcggcatttaaccaggcgatggaatttatcgctgcattcaccggcgcaactggtggaaacgtccatatcaacaagcgatatgaagacgtcgttctgaacccgtccgagctgacctcctacatggcggctgtgcagtccggcatgatgcgcatgatcgacttcctggcgtggcagcagcgcattggcctgatcccgaacgacgccgatctggaagacgtcgagcaggagctgagagatagcgctgaggatacccagctgatctttaacgccgcagcacggcaggcgcagcaggggcttgacaacccggacgaccagcaggacgaagacgaagatcccgagcaggatcagcccatctccaagaagaaggccagcgcaccacggaagaagcgcaccaacaaggagactgattaatggcgtccgttaactcgcggatggcgtcggaggcggtgagacaccgcctttacctattccgctacggcgaggggcaggctcgccggatgacccaactactccgccgcatggcggtagacgttgtcggtcgcctgccgtatgcactggaagagtcacgcataaccgcagacaactacacggttaagcggctggaggcgatcaaggccgccattaacccgaccatccagcggatctacaaaagcatttacggccagctaaaagccgaccttgaggcgttgagcaatggcgagctggcgtatcagtatcagatctggagggagatcatccctaagccggtgctgaacttcgtaggcggactggtggagatcccggagacgcaggtatgggcagcggcgaacagccgcccgttccagggtgtcctgctgcgtgatatcccgtcgctgcttggtgacgggctaaccgatgccatcggccgcgctgttcagcagggcatcctacagggcgagacgtatgaccagatcactcgccgggtgcgcggcagcgcagcagcaggctacaaggatggggtgattggcaccagcgagcgcaaccttgcaaacgtgacccgtagcgccgtgtctcacgtagcggctgaggccagggacaagatcggggaggcgaatgcaccgctcatcaagtccgaacagtggctatcgacgctggacaataagacttccaagctgtgcattatccgcgatcaactgctgtacatgcgggataagaagcatacccctatcgggcatagcgtgccatacggggccgggccggggcgcttgcacttcaattgccgcagcacgtccaccttcgtcttcaagagctgggaggaactcgggattccgggagtcaagatcaagggtgcatcgcgcgccagcatgaacgggcaggtgccgatctacatggattattcaagctgggtagaacgccagccgatgagcacattaacgcaagtgttcggcgtggagcgtgcccagctaatccgcgacggcaagatctccccgcctgacctgttcagcgacaagggggagtatttaacacttgcccaactccgggcgcttgaccgcatccctgacgacgactaacatcgtggcgttaacaaccgaggaataacacatgtggaaatacctgattaacaaagaagcattcgacgcccttccgccagaacagcaggccgcatacaaggccgcaggcaccaccggcaactatgtgctgaacattgaagggatgcctgacaccgaagccatgcagcagcagatcgctgacatgcaggcgcgcctgggcactatcgacgcggagaaggccgccgaagctgagaaggcacgacaggccgcgcttgagctggcgaaaaagaacggcgacttcaaaaccattgaggaagactacaagcgccagatcgccgagctgaacggcaagatcgagggcttcggcaagcagcgccgcgatgacttccttaacgcgcagatcgacaagctggccgcagagcttggcggtaaggaatatgccgcgctgttcaaaccggcgttgcagcagcgaatcgccgttgaaggtggcgaggatggcggcgagttcatcgcccgcgtgctcaaagacggcaagccgtcggccatgtcggttaacgacctgatcggcgagttccgtgagaacccgacctataaaccggtctgcgttgcgcctgcatcctccggcaccggccgtcatcatgcacctaccccgaccccgaccccgtcgccgtcggcaagcgttgacgatgtgcgcggcaagcagctgtcacgcgctgaacagatcgccgcaagtattgacgctggcgagtaagcacaaggcccggcactgccgggctttttcttgcttgtccggtagtcagcagttatcatccagacgtttaatcactcaaaggatatcgcgcgatgagctttactatcttccagcgaaaactgatcggtactaccgttcagcttctcaccgaaaatctgaacgtgttcaatgcggcgtccggcggcaccatgaccatcggcagcggcgaggtcatcaaggagaccatggagaaaatgaccatcggtatcattgatggtctggtccaggatcgcaacgagcacgcacccgttaacaccaaagttgaaccgaaggttctggctcgcatcctgggcggttccatcaactccgcaggtcgcttaggcccggtggcgatcacctccggccaaatgcgcctgatcgagaccgacgttaaccgcgctgcggctgagatcgcaaccatcgcatccgaagcgatgatcaaacgctatattaccgttgccatgggcgcgggcgtagcggcgattgaatccttcggccagggcatctacacccaggacgcgaacgttactaacaaggctggcgagctgtacccgactgtcgaagacttcccgctggcggcgtccatcttcggcgatcaggctgacctgatccgcacctggttcatgtccggcacgcagtgggcgaagttctccgcacgcgaggcggtcaagtccgcgaagctggtgttcgagctgggcaacatgaagatcttcaccgacggcttcggtcgttccttcctggtgtccgacgcggcaagcgctggtatttccgctgccacctccggcggcgaagcgatttacgcgccggatactgcgattgttggcctggctgcaaacgccatccagatcaccacctccggcctgaaaatggcagctgacccagccaagctgggcggtgagaacattgaaagctggtggcagggtgaatttaactatggcatcgcccttaaaggtatgcgcccgaccctggccttccgcaccgaaaccgaaggtaagaaaactccgactatggccgacctggtcaagaaagagaattgggaagccgagaaaggcgagaccgaccgtaagccagtggacaacaccaccgatcctgtggttccaactcgcaacgtccgcgagaccctggggatcattatgaagctgacgcctaccgtgcttccgagcactggcggcgacgctggcactggtggtgcataatccgccgtgatttaataaaggggcttcggccccttttcttttggagatgaaaatgattggcaatctggaagacctgaaagcattcgcggctgcaaacggctatgtcggcatgaccgatgaagagctttccgtgtcgctacgacaggcgaacttgtgggcatggtctctaccgtggaagggtgagcaggtggaacccggccaacctgacatttggccccgcactatctgtgacgactacaactgtctcgactatgacaccccgccggaggttatccgcttcgtttataccgtcgtatgcgatgccgtcgactctggaaccgagttcaacaccgcatcggctggcgcgttcaaaaagcgcgtggggatcgatggggctattgacgtggaatacagcgaacaaagcctgtacaacgccggattcgaagcgccatatatgacgggcatgatcggccactggctcgacggcaacgggcgcggctgcaacatcaagctggagcgcggataatgaataagctataccgtgagatgcgggcggaggcccgcaagctgtttaaggagttcggcgcggttatcaccgtgaacaccccgggcggaatcgggcgcgaccctaacaccggcgcggagatcgtgacgccgccgggagtggtgtgtaaggtgctgggggtcatcactggcgtagatctcaaattttgggggctggcgaccatcccgccgggtgagcagcagatcgtcatggcatggactgacaccaccggccaggagtggacgccaaagatgaatatgaccatctccggcggctcacgcacgtatagcatcaccgagatcaggccggtgatcccggacggcggctacggcatcgtttacaagctgaggatcaaggggctgtaatggcgagaaagcgcaacggggcaacattcgccgctaacgtcgagaagtgggcgggcggcgtcgtggagcgccacgaagagatcgttcagctggcggctatgaaggttttcgccatgatcattcagcgctcacctgtcggcaaccctgacctgtggaaccgcaatcagcaggccgtgagagagcgtaaccggatgagcgacttacgaacggctatgcgtgaaagcgacaccttcggctatacgaccaagcgcggcacccgccgactaaaaccgggcgcgaatatcacggcggccccggcgcggttctcttcccctgtcggaccagtcggcccgcgcattccccgccttcgccagaacgagcagggcgttaaccctgtgggcaaggggtacgttggcggccggttccgggctaactggcaggtcgggatcgacttcctgccgactgaatggctggatgagcgggacaagtccggcacgccaaccatcaacaaaatggtgaacgccgtcgagcgattccgcgtcggaatggcagaacatatctatttcgttaacaattcgccgtatggctacccactggagtatgagggtcactcccggcaggcacccgccggaatggtgaggatctcctgcatccagtttgaggaggcattcgcggcggcaacatctgaggctcaaaaagtatgatcagcacttcgcagatccaggcaaaatttgacttaatcgccatgaaatggggtcaaaacaataacattgcactgatctggcgcaatagcgccaacaacgacatgaacgagcaggcggtgagcacggtggtcgcattcccgcagcacatccccgcgccatccatctctatgggattccagcagtcagaccttgcgaagcgcgggatctatcaagtcatgttgcgcgccccgcgcctgacagggacggcggagatctacgaccgggctgacgcgctggtggaggcattcaatgaagcgatgttctacgaaggaaattatgttagcatcggcgacgacaatcagcagctgtatctaacatcaccggccgagatcggggctgactatgaagacgacgccgggctgcatgtggctgtgaccatgaactaccggatcaacaacgcaagaggctaaacatggcaacgaaactttcgtataacatcccgaacggctcgacccttcaaattgcgcagaccatgggcgcaagcgtggccgtaacggggatcaccaacgcaaaagaggccgtagcctcgatctcttccgaagattccagcatcgcaacgggcgattacgttcagctgttcaccagctgggtgaatatgtccggtctggtctgccgcgttaagtccgctgcggctggcaagatcacgctggagctggtcgacacctccgatactgagatgtacccggaaggcggcggagcgggaactatggttaagatccagtcgtggatcgacctgccgcttaccccgaccattgcgaactcgggtaacgagcagcagacaaccaccttccaggctattcagcatgagcgggcggtgaacatcaacacctacaagtcggcggcaacgcagaccttcaccatggcgcacgacgccagcctaccggtgcgtgaagtgctgaaacagctggatcgcacgcaggacgttaccgcgttcaagttctacaacaagcgcgcgcgcgaaactcgcgtttatggttgccaggtctcctttaacgagatcccggcgtccgaggtgaacaacgtcgaaactaacagccttgttctgagcctggttagcgagatggtcatctaccctgccgcgtaaagcgtgctattatcggggcggcttaggccgccttttttcatatctggagacaataaaatggctgcaaaatttaagttagtaccggctggaacattcgaacttccgatcctgatcaccaccgtagggcaggaaaaacccactccgcttaaattcaccttcaagcgtatgccgctaaccgagctgaaagataagcaggacgagatggtaaagcgcgtgcaggctctggacgaacaatataaagcgcaaaagctatcgacggtcgaagatagcgttctgcaatatccgatcatggctgacttcgtgatggagatcgcctccgggtgggagttacagcacgagtttaatcgggaaaacctgatcaccctgttcgacaactacccaacggcgtttacggcgatcagcgtaggctatcaggccgagctgtggagactccgccaaaagccttaaccgccgcgattgagggtctgtatttccccgatccgccgcagcagttagtcgacaattttgggggagaactggaagattaccgtccagaagttgagctatcagcggagatcgttgatagcttttgtttttatcagcggatagacactcaatggcgcacggggccgggcggtttaatcggcctcgactacaacgtgatcccgactatggcggagctgtacggcgttaagtttgaccgcctgcttatggatgatatctccgtcatggaagcggtcgcgatcaatgttctcatgaggaaggagtaaaggcagcatgagcgacaacaccgaacgcctaattgtcgacgtcgacgccagcggggttaatgcgggggccaggtcacttaacgaccttgtcgacgcagcgcagaacgctggccgggcggccgatggattaggggataagttcgacgagatcaagccgtcggcggacgcggccgccggggcggtcgataacttcaacaacgaggcgaagcagacacaggaggccgctggtgatgcggccgttggtctgtaccgccaaaaccaggagctacagaacttactcgaccgtatccggccgacaagaacgcaattgcgcgacctggcgcagcagcaggaagcgctggcaaaggcgcaggctaacggccttcttggtgcgaaggaggcggaggaatacaacgcaattctcgccaaccgcgccgggatcattgatcgcgcggatgcggccatgcgcgggctgaatgtcacgtctgagaagcagaagacgctacagcaggggctaaccatcacgaccgggcaatatcgcgcggccatggggatgctaccggcacagatgactgatatcgtcacccagctggcaggtggtcagaatccattcctgatcatgatccagcagggcgggcaaatcaaagactcgttcggcggtctgaaaaataccttccaggctcttaaacagttcatctcaccgtcattccttgggctggctggcgctaccgctgccattgccgcgatggggtatgccgcctacaccagcgcagaccaggccgacaggctcacggcgtcggtgacgctcatgggtggcgcaggcttcaagtctgccgatcagctgaaccaggcagccgttcgcattcagcaggtgactggcgacagcattagcagcatcaccgaccgcctgatcgagctgaacaacaaaggcgggcttactgctgaaatgatggagaagatcgcgatctccacgtcgaagttgtcagacgccggaatggatgccagcgacgtgatgaaggacttcgactcgctggtgaagaatccgatcaagtcaatcgccaacctcaacgagcaatatggcttcatgactgaggcgcagatgaagcacctcattcaaacgcagaaggagaaaggcgagcaggccgcagcagcggaggcgctggatatctactccgctgccatgaacaagcgcgccgatgaggtgatcgagaggactgacaatgtcgggcaggcttggaaggcgttaaagacgacggcatccgatatttttaacgatatggggatcgtgcttcggtcgtggggtaacagggccgtcgatatcttccatggtcaagctgtcaatcgacgacctgctgaactacctggcgcagatggacagcaaatttacgctgggcgttgccaacctgcttgacaaggtgccgggcgtcgatgggcgcgccgttctacgggctatggggatcgacgtcgagaccgtcgagaagaatggccgggagtccatcgagaagggcaagcagatcgccaaagagttcgcggaggtcagtaagcgggcctttgagagccaggcagattcagaggcccgggcgcgcaacggcaatggggctaccggcagcggggccaccgatgagaagagccgcgaagcagtcagcaagctggcaagcgagcaggcgaagcacaacaaggaaaaagccgtcaccgttgcgcagggtgatcgcatccttgagcagtatcaggcgcaggagctggcactgcgggcgcagatcaaaacgctgaaagaccgcaacgcctttgacgtcaacgcctccgagcagatgaaaaactatcaactgctggtggcgaagatctccattctggaaggcatccgggcggacgccaaaggccgggcgctcaccaaggatgagaagtcgctgctggcgagcaaagaggaagttctggcgaaggccaaaaccgtcggcctgctgggcgaccaggtcaaacagcttgagaagcaggcgcagatcaccgatgagctgacccgtagcggtaatgatctttccgttcaggtggcggcgatcaacgcatcgtggggcatgtcggctgacgaagccgcgagactgctggagaacatgcagcgcgccgcagcattacgcgataagggcgctacgcaggagcagatcgacgaagatgcgcgccagcgcgaagcactgcgcaaggccaccgatgagaagacgcaggattgggccggtggtgcccgttcggctatcgaagagtggggcaaagatgccaccgacgtttcagccaacgttcagaaggcattgaccggcgcgatggattccggtctggacgcgatcaactccttcgtgatgaccggcaaggcgtcattcgctgacttcacgaaatccatccttgggatgatcgtccagatgatcaacaagtggctaatctttaaggccatccagggcgtcggcggggccatgggcttcgacatgggtggtttaggcttcaatgcgaagggcggcgtctatgacagtccgtcgctgtcggcgtacagcaatcgcgtatacagcacgccgcaattcttcacctatgacaagccgaagccattcgccaaaggcggggttttcgcggaagccgggccggaagccatcatgccgctggcgaaggattcaagcggtcgcctcggtgttcgtgcgcagggcggagctggtggcggagtaaccatcgggtcgatggagatcaacgttgaccagaacgggcaggccaccgccaacgtgtcagaatctggccgacttggtcgggcctacggtgatgcaatggccgcagcagttcaggacgggatcgcccgggcaagttcgccgggcggtcagatctggatgctcatcaacgggcacgcgtgatactctacagcctccaacacaggaggctttttttatggcaacaattgacgcgtggatctggcccctggcggccgggcagcaggtgtctgtaaaagaccgcagccggtctaactcttttggtgacggctcgcagcagaatgttctggagggcatcaacccgttcatcatggaggtgccttgctcatggactggcaacgcgaaaaccgggaagcagattattgacttcctgaaagcgcacatcaccaaccctttccgcatggttccgccccacggtgagcttgggctgtacaccgtcaagaccgggtcgatcaaatatgtcgcgctgggccgggctgtaatgaacatcaccttcaccgcagagcaggcggtgggcatctatacggggacaaagggatgagcaacacaattttcgacgaagcaacaaaattagacccatcaggcaagatcaccctggtcgagatcgatggctcggagttcggcgcggggatcattcgctgtcactactgccagcttccgcataccagccgcgagatcctcgacgcagcaaacagcacgctgaaccgcgatcagctgttcaactgcaaaagtgctaatacgcgcggcaccgtcacgaagaatgaagaccgcaacaccatcaactttaagtcgctgggtgtcgatgcgaacctgctgttaccggcattctctggcggcctgactggcggcaagtatcaggtgatcgaggtggttggtcgctgggtgactccgccgccatcaactgacaacctgtatcagatctactacaagaccgccgcgcatgatttttcgcccggctacctcaaaagcgggacgctggcgagcgtaaccgaagatctcggtgatggatggctgaaattctcgtttgacatgtccaggctgtccgcaggtggcgcagattgggttaacagccagattatcggcgtccgtctcgacctgtggcagcaggccgtaggcgagatggagatcaagcgaatcagtatcctgaacaacgacccgggcgacattgacggcagcaagctgaccccgaaatcgatctggttcgataacgtcgagtatggctattgggcgttcatgaccgaagggatcgagttcagcagcgagcagcagggtacgccaaccctatccatcggcaatcagtccggcgtgatcagcgcctacctgcgcgcataccagcagatggtcggggcgaaggtcaagatcatccagacctacgccaagttccttgaccctcgcaacttcgaggacggcaacgagttcgcggactcaatgcagcagtggacgcagctttactacatcgaccggccggactacgaaggcgatgagtatgtgcgattcgcgctttcctcaccgctcgatctgcaaaatttccaggtgccaacgcggcagatcacgacgttctgccaatggcaggcgcgcggtctgtacgggaaagggctggacgccggggaagaaaacggatgcagctggaaccgtggcacggccaaaaagtggtacgacaagaaagggaatgaggtcgacgacattacaaaggacgaatgcgggggatgcatccaggattgtcgcctgcgcttcggccagctggtgagtgacccgaaggcggccgttctggactacggcggtttcatctcggtgcgcctgattgattaaacgcgccgtatcgcgttctgcggcgttttcttgcgtaagacgtccgaacgtatggcctgacgtcgttaaacgcgacagcgtgccgttcaggcccgtagttttcgattcacgaagataggaatacatcccatagccatatatataataaaaaccctcccaagggagttttatttatatatggtcttgggtatgtcctatatgtatttatggaataaatatatatatacccattgtccctgttccgcgaaattacgttattaaattcaattacttacaaattcgcggaaagttcgaggaaaggtaaaaatgctcagtgtaaacgacatcccggaaacacaattaacctatattaaacaacaccttacagagtgttcgccgcaggagggatgcggactgcttatccggttggcggaaagcctcgaatactggccggtcgtgaactcttccggcgacaagatgaacagctttaggattgcgccgcaggactacgccgaagcggaggaagccggggaggttgtcgccatcatccattcacaccctggcgaggatggcattgcttacccttccattctggatcggcaactcatgcgcgaaacgtgcctaccatggatcatctatgcgccgcaaaaggatgaaatcgccgttttcttcgaagagccagtagggctgctgggtcgtgagttcgtccttggggcgactgactgctacgggctggttatggcatggcatcgttctcgcgggatcttccttccagacttccgccgaccttatccatggtgggagcagggggaggatctctttacagatgagaacttcgcggccgctggcttcgtcaaaaaggcggaggcggagccgggcgacatggtggtgttccgcatcgcgtcaaaagtaaccaaccactgcgggatctatgtcggcgacgggatgattattcaccacctcatgaacgcgaagtcatcgcgcgacaggatgtatggaacttaccttgagccgcgcattactggtattcttcgtcatgaacttatgccggagaaaatcacatgggaaaccagttaagcacaattcgactatatggtgagctgggggcgcgcttcgggcgcgtccatcaccttgcggtcgactcatgcgccgaggcaatcagcgcccttaccgccatcctcccgggcttcgatcagtacatgagagatagccagtcacgcgggctaaccttcgccccattcatcggaaagcgaaacatcggattcaatgacatgtcgcttcccatcccagccgatgaagaatttcgcattgcgccggtggtcatcggtaacaaaaaagccgggcttttccagacgatcctgggcgcggcgatgattgttgccggtgtcgtggcgtcattcattcccggcgggcaggccgtatccccttaccttgtcgctgctggggtctccaccaccgctggcggcgtgatgcagatgttatccccgcaggcaaccgggatgaagatccgcgaggatgacgccaacgcgccgtcgtatgctttcggccagccggtcaatacgacagcacaaggtaacatcgtgggtgttttgtatggcgagcgtgagatcgggggtgctattatcagcgccggaattatcgctaatgaggtgcgctcttaatggaaatcaaaggatataagggcgggagtagcaacgtgcatactcctgtcgaagatccagattcactggtcagtaacgcaactgtgcgcatgttgctggcgctggccgaaggtgaaaccgtgccgattagcgcggaagacctgccaaagcgggtacacctggacggtacgccggttcaaaacgaggatggatctgtcaacatcccgggtgtcaccctggaataccgaaacggcaccccgcagcaggagccgatcaacggcttcccggcggtggaaagtgagacgcgaatcaacgtcgagctgaaaaaggcgtcaccatgggtgcgcaacgtctctaacaccgagatcgacgctgtccgcatccgcatgaactttcgccttgtcattcagcagaaggacggggatcgcgtaggcggccgcatcgactacaagatcgagtaccgcaagaacggtgacagcgcctacaccgaggcgttcaacggcgcagtcgacggcaagcagaaagacaactatgagcgcgatcaccgcatcgacctgccgaagagttcgaccggctggcagatccgcgtcactcgactaaccgacgacagcacgtccgacactacgatccttaattccggtatcgtggctatcaccgagatcgtggatgcacgcgtccgttatccttggacgtccctgctgtttgtcagcttcgacgcaaaatctttccagaacatcccgaagatcagcatcaagatgcgcggtcgcatggtcatggtgccgtcgaactatgacccggagactcacacctacaatggcacatggaacgggacgttcaaacaagcgtggactgacaacccggcgtggatcgtttacgacattatcctgcataagcgcttcggtatcggccgccgcatcccggcgtcattcctgaacaagtggacaatgtatgccatctcgcagcgctgcgatgagctggtgacgaatgccgacggcacccaggatcgccgctacacctgcaacgtgtacatccagaagcgcgcgcacgcctggagcgtcattcgcgatctggcgtcgatctttaacggcatggtcagctacagcaacatgcaactgcaattcgcgcaggatgcaccggcagaagtccgccatgttgtgactaacgacgacgtcgtgaacggcacctttgaatacacatatggcagcatgtcaaaccgtcgcgggatcgctatggtcacgttcgacgacccgaaggcgcactataagactcagaccactgtcgcgcagttcaaagacctggtagaacgctatggcgtcgaaccactcgaagtgtccggcatcggttgcactaacgagtatgaagcgcaacgtcgcggcctgtgggcgctgctgtcgaacattaacgacatgcagatcagctaccgcgtcggcctgaacggcatcaagtacctgatcggagacgtcgtcggcatcgctaaccgctatgtgcaaggcggccagttcggcggtcgcgtcctcagcgtcaccggcaccaccatcaccgcagatcgggctatctccgaccatgtggctgtcggcgaccgcgttatcgtccgacaggctggatctgacggcacctataaccgagccatcaccgagattgcggaagaccgccagtcattcaccgttgaaggcgctgatcttgatattcaggccggggagatcttcctgctggatacggcggagcttgcgccagaattaatccgcatcaccaagatcacctacaacgagcaggacaacaattttaccgttaccggcctacagtacagccattcaaagtatttgcaggttgacaccggcgcgcgaattgaagaccgtcctacctcgctgatcccaaccgggcaggtgtcggcaccgactaacgtggtggccgaaggttacagcatcgtcaaccaggggctgcggtctgcaaatgttaactgttcatgggctggtgtcgaccaggcgatcagctatgacattcaggtacgccgcacatctcaatctaacggccagtggtcacaaggctggactaaccttgccagccagtcgagcacgtccgtagacctaaccaacgttctgaccggcacctatcaattccgcgtccgcgccgtatcccgggatggcggatcgtctccatgggctgaatccaatcaggtatttgtcgacggtaagcgcggcagcatcccggcagtggctggcctgaatggcgttggcatcgtgaacggcattacctggcgctggatgactggcaccgacgatctggttgacatgaagtcgaccgagctacagttccgccgcgtcgacgataacggctcaccggttggcgactggattgacctgtcggtagtcacctaccctaccggcacattcacgcagaacggtctcgggttcgctgaacgtgttcaggttcgcgcgcgcttcgtgtcgtcgtatagcgacgctggcccatggaacacccctgttatggctatgacgtccgacaacatggacgactactaccagaacattgacgacgcgatcaaaggatcggacacctacggcgagcttaccgacggcatcaaggaggtaagcgacagcgcgcaggctgcgaaggatgccgcgcaggcagcacaggtgacggctgacggcgctgtggcaaccaaccagcagcagcagcagcagatcaacaaccaggccgctgaaatcgcgcagaacgccaaggatatcaccgcagccgctaacgccggttcggataacgcgaaggctatcgctcaggagatcctcgaccgacaggccggagatctggcgaccgcaaataaagcggcgagcgacgtggctgacgctatcgctaaggctgaaaccgacgacgcagaagtggcggcccaggctgcggctaacctgctggcgacaaaaaacgaagtcgaagcgcagatcagcacgactaataccacgatgcaagatggtttcgacagcctggcgcagcagatggcgtccatcgcggcaggcactggcgagcagttcgacagcctcaagatctggtatttcgataaggacgccgaaggctgggcatcggacgacagcaacatcaacctcctgccggttgacagcgacggctggatctaccctgctggcgcgtcgtcaaccatgcggtcgccgaacccgctggcaattgacgggcagagctataaatacatccgccttcgcatgaagcgcgtggggaatcctgcgtgggctggccgtctgtactggatcggcgtagatgagaaaggctgggaatcatcgcgatctgtggctattccggcaccggactttgacccggcaaccgggatcagtgtcatttccatcccggatcttctgtgggccaactccggcacgatccgccgcctgcgcctggacttctccagcaatcagagcgcggataattattttgccgttgactggctggccgttggccgaccgaccccgggcgcgtctcaggctcagatccaggatctaaagaccgccatgacagcggcggactccgccgaagccgcagcgcgcaacacgctggccgttcagcttcgcggcaactatgagggaaccgacccggccaagctggtgacgggcattatctacaacgaacggcagacccgcgtcaccgcagaacaggccatctcaagcgacgttaacacgctgcgcactgactacaacgccaataaggccgcagtcacccagcgccttgacactctgaccagcgagaaccaatcgcaggcccaggctctcacgcagctacaatccggcctgactgacgccaacggcaagatcggcgcgaacaccaccgcgatcaatcagctgaaaaccgacgtgtcagacattgacgggcgcgtgacggctaacagtagcctgatcaccggccttgagagcacgatcaacaacgacgctatcgcgctggtcgctaatccgaacaacctgctgacgaacaccggcttcgagcgtgataaggcagcatggactggcttcaactcgtactcggatatctacgcggctcaagtcccgcattcaggggccaaaatcctgcgcggcaaggctggtggcactacggcgatctctcaggtagtggcaagcctgaaaaaaggccgcacctaccgcttcggcgggtatgtgaaacgcagtggcgatctggtcatcggcaacgttggcaacaacaaattcaggatcggcaacgccgacactggcgcaggcccgctgtctgaactcccgttctctcagaacaatgtagggactaactggacgctactgacaaaggactacgtcccggccagcgaccagaacatcaccttcgggatcaacttcctgatcaacaccggcgagctttactttgacgatgtttttttcgtcgacgtaaccgatgaaattaacaacgcagcgaacgccagcgccatctctggactgactacgcgcgttactgccgccgaagggaagatctccactaacagccagtcgattacgcaactgaaaggcgacgtgagcaccttgcagggccagattgcgaacaaggccgacgcaagcgcgttacagcaactgcaaaccactgtcagccagcagggtgacaagctggcgtcgcagggtagcgccatcactgaattgcagaacacggcgcagaacggtaaggctaaatactggctgaccaaggtcttcgacatcaaggttaataccggctacgtgccgaagttaaccgatctcgcaggcgcgccgccgctggcagtatccgaaatggccgacgcggccaagctggattttcagtcatacggcgactacaaaatcgcctacgcgaagtcgctggtttacctcaacgctgataagaccatcgagatctccccggggtcacgcatcgttgacgacaccggccgcctttacgtgaacggcgtcgagaccgcatcgttaggcgcgagcaccacgaaatactcgcttgctcttaaaaagggctggaacaccattgagttcgtcgtggcgcagatgaccggcggcttctacatcaacttcggcctcaagctatccgacaacgtcgatcagctgttcagtggtgccggtcagatggctgcggcgtccgctgcgcaggtcatttcctcccaggtggaacagaccgccggtaaggtcgacgcgaacagcagcgcaatcctgaccctcaataactcggtgaaggatatcaacaccgcgttaaacaataaggcagacgcaagcgcgttgcagtcactgacaactcgcgtaagcaacgccgagggcaagatcacctcccaaggcaacgccatcacccagctcaccaacgacctgtcgacggcgaacggcaagatcacggccaacactggcgcgattagcagcctgacctctcgcgtgactgcggccgaaggtaagattgactctcaggctgaatcaatcacctcgatcaactcatcgatcaaggggattctgacgcaggccgctaacctcatccctaacccgacggttgacccggcatacccgcaaatggggatgaccgtagtttctaccacgtcggaaggcgtcccggctggctgtccttacgcttgggcgatcaaatgccagtatcgtgaccacgtgccggtgatgaataacattccgtgccatgaggggcaggtgttcgagatctcggtactggcagcgtgcggcaccggcacggcaccattccaacactacattgggacgtcaacgcaggcggcgggcagtatcgggtctccgcaggcgaacggcggccagatctcagcggcgaccggcgcacaatggacgcgaaccacctggcgattcaagccgaacgccacgcacgcagcgaaaggctatttccgcccgttcctgcaaatcaaccaggcaggcccggacttcggcactgtatggtatgcaaccgactggcaggtgcgcgacgtcaccgcagcagcgaacgcagaaggcaaggccgacgcgaacgctacggcgatcagccagctaactacccgcgtcaccaacgcagaagggaagatcacatctcaggggcaggcgatcaccaagctaaccagcgatctgtcgaccctaaccggcgtagtgaacagcaaggccgatgcgatcgcgcttaacgcactgacaacccgcgtatccagcgcggagggtaagattgcatcgcagggccaatcaatcacccagcttactaacagcatcagcaacgcagagtcggccatggatgcccaaggcaagatcccgggtaacctgctggcgaacgcctcgtttgagcgcgatcaagcggcattcaccgggtggaatgcgctgtctaccgtcgttacccttctcaagccgcacagtggcagcaagtcgctacgaatggcgagcggcgggacggctggcgtgggccaggaggtggaagttacgcaggggcgtcgctaccgcttcggggtcttcgcaaaacaggattcaggcaccgagatccaagatccggcgaataccaagttcagggtcgcggatagcagcggtctgctggcaggcgtcaattacgggccgtttactggtgactggcagcacgttttcatggactggacagcgccaaaaaacaccacggcatcattccagctaactacggcgctcaagtccggcgtgatgtactttgacgacgtctatgtggtcgatatcaccaacgagacgaacatcaaagggaacgctgacgcgatcacctcgctgaacacgaaggttactcagcagggcaacgacattacgtcgcagagcaacgcgatcaccaatctgtcgaacagcctcaaaactcagcagtattcgaatagcaacccatgggtggacgggtcgtttgaatcatacgcagatgggcaggcaattagcggggctaacgcagtagtcacgactgattatgcattcagcggttcgaagtcgctcaagtgtcgccgtgctgacggtgaaaccggcaactccgacaagatgtttggttatgagaccgccatccgcgaaaacgccgtttatcgctatgaatgctgggcaatgatgccggaagacgagacgccgccggatggctggggctgtaacgtcgggatgatcgttcgcaccgcagcaggaaccgcagcatggccgacagcttttgccatcaatgaggcagcgctgaccgctggcggcggacgtggtaaatgggtcaagttctccggcaagttaagtgcgggaggctctcagaagactcgcggccgtctgtggatctccactcgcggcacctccggcggcccggggtatcgtctgtacatcgacgacctggtgattaccgacgtcaccgacgcgcacgcagcgcagaccaccgcagacgcgaactcttcggccatctccggcttaaccagccgcgtgagcacggcagaaggcaagatcaccgcgcaagctgactcgatcaccaagctaaccggcgaaatcaacaccatcaatggcacgttgagccagaaggccgacgccagcgcggtaaacgcgttgcagtctcgcgtcaccaccgcagaaggcaagatcgatagccagggcacggccatcactcagcttacgaatgggcttgaggcgtaccgccgcaccggtgaaaacctcgttcagaacttcgacttcctgcaaggcgacaccgcctacaacgtgcagaacgccagcaaggtgactttcggcgactatggcgacggcaaggtgggcgtgcgcatggttcgcaccgatggcaactcgccgggcatcttcgccaacaacaaaaagccgatcccgcagaacgggcagcgccgctaccgctatgttgtgcgcgcgaagggtgtaagcggggcgatgaacctgttaatgcgtcgctggaactataacggcggcgttgaaggatcttactccgacaaaaacaacaccctgacgaccagctggcagacgctgacatgggaaacagatctcaaccaggcgtccggcgtggatggggcggcttttggtctctactgccacccgtcaaacgcggagatctggatcgactccttcaaggtttacgacattaccgaagaagtgacgatcaaggctaacagcgacgcgctgaacacgcttaccagcaccgtgacgcagaacgggaaagatattgcggcgcaggcgaatgctcttactcagctgaaatccagcctgacaaatgacgcggtagcactggcggctaacccggacaacatgctgacgaacaccggcttcgagcgtggaaccgacaactggactggtttcaactcactggctgacgtgtacgcagcgcaagcaccgaagtccggcgcgtatatcctgcgcggtaaggctggcggcaatgcgtcgatctctcagaacattctcaacgtgaagaagggtcagacctatcgcttcggcggctatgcgaagcgcacggccgacatggcaatcggcccgaacaccgtggggaataacaaattccgccttggtaacgccgacaccggcgctggcccgctgtcagaactgaatttctcacagagcaatatcggcaccaactggacgttgctgacaaaggactatgtcccgtcatccgacatgacgatcctgtttagcatcaactggaacctgtcggcaggtgaggtctactttgacgatgttttcttcgttgacgtcaccgacgagatcaacaacgcagcgaacgcgacggccattaacaatctgacgacccgcgtcacgtcggcggaaggaaagatcacgtcgcagggtacggcgatcacccagcttacgtccgacctcagcaccgcgaacgggaagatcacggctaacgccaacgccatcaccagcttgcagtcgaccgttacccagcagggcaacaccctgaccactcaggggcaggccatcaccaagctgaacagcgacctttccgacctgtccggcgtggtcgacacgaaggccagcgcgtcggctgtatctcagctgactacccgcgttaccaacgcggaagggaagatcaccgccaactccacggcgctgaatagcatcacttcccgcgttgacgatgcagagtcggcgattgacggcctgaacgagacgacggcagcgaacgggctggcgatggctaacggcttccagcaacttcgcgcgcaaatcggtgacaaccaggcggccatcacgcagacgaacaaggcagtagtggatcttgagtctgcaacggcgcagcagatcgacacgatcaacgcgtcaatggatggcatgagcgccaccgttcagcagacctccacggcggtagcggatatcaacggcaagttgtcggcgcagtggggcgtaaaagttcagactgacaccggcggcggaaacccgcgcatcgctgggattcagcttggtatcgacgcaagcggatcctctcaattcctggttatggccgacaccttcgccgtgtacactggcggggcaaacaaaacctacccgttcgttgttcagaacggcgtggcgtacatgcaggaagcgctgatccgcgacggctcgatcaccaacgccaagatcggcaacgagatcaagtccaacaacttcgtggatggctcgcagggctggcgcatcggtaaagatggtagctcgcagttcaataacgttgtcgttcgtggcgcggtttatgctactgacggctggttcaacggcactgtgtacgcgaaccgcattgagggcgatattggttccttcgcaatcaacatcgcacagcaccgtactcgcaaagtaccgaaggcgacctggcagtggttcgagttggcccgattccgtcgccagaacttcgaccaggtgatcaatattcgcggcgggctattgcagaccgatagcatcaccatcgacggcggagcgagactcagagcggggatgtcatacgcgccaggggctgacggcggattgaatcctggctatctgtcttatgcaatgcttcttcgtggcacaggcgctacgtctggtggcggcagtatggagatcggtgtggaacttgcctatgaaaccggtggcgctactcgcctgcggaccgctcaggaggagatgaacatagacaacatgtcgttcgtcgtccctgcgggcaccggtgatgcaatcctgcgctatggctgctaccttgaccgcaacggccagatggttttaaccatcctttcgcggttcgacgctttcgcagcgcgcaataacaacgtaattcgtggttcgtccacgccgtaacatggaggcggcccctgcgggggccgatattgaatggcaaatattagcgatcagctcgcggctgatattcacaatgcgtttaacaaatactacacagacctgtcgaaccaagatcagatcttcttcggcgtcggtgacgtgacaattacgaagcaggacggcaccaccgccactgtgcgctcatggaacaaggtgatcggctcagtggacaccgcagcgcagcgcggggcggagaataactttacagctgtacagacgttcagcgccgggatgaagattaacggtaacgtcaactgtatggccgacaacgccatgatctacctgggcaagaactcagatcttgcgctgcttaaaaaatatgggcagggcgggacaatcgcggttggcagcggtacgccgtttaagatccagcgcactaacaccgccaccgtctcaccggcctctacggtcgaggatattctgaccattggcacggataagaaaaccacggttgccggagcgcttgccgctggtggtgatgtgacggcgaaggggaacgttgacaacgcggccagcggaaagatgtattcccaggcgctggagctgtcatttagcacgccatacattgattttcatttcaataacagcaccgcggattacaccacgcgcctgatcgagcaagtgtccggcgagctgaccctagaaggtgcgtttatgtgtaaaaggcatctttacgcatggggatcgctcatggcccggtcggtggcaccagataacgtcccggttgggcaacttattaccggcgcaccgttccagtcgatgatccagggtcgcggagcaaacggtgatgcgcgcggcgcggtggctaactactacatcgaagagctggtaggaaccgaacaccggatcgtcgcttacctcgacggctacgggagaaccgacgcgtggatcttccgggctggcggcacgctcaccacgccgaagggtgacgtcctaacgaccggttccgacgtgcgcctgaaaacagacttcacgcaagcgcctgaaaacgcctcagagcgcattgagcgcttaggggtatgtgagtaccggatgaagggagaaacgcgcgttaggcgtggttttatcgcgcagcaggcggagaccgtagacaaggtctatacctatcaggacgtcgagcaggaaattgacggcgagcgtatcaaggtgatgaacgtcgactatgtggcgatcattgctgaccttgtgtcatcggtgcaggaattgaaggcgcagatcagggaattgaaaggggaatgaaaaaaggggccgtcggccccttcttgttatgaacagcggactttcacgccgtttaccctgttcaacgcaggattataacagctgacgctatcgcccacctcgatcaccctgcctgacgaccacgctgcgcgctctttcccggccgtcgtgttctcataaactttcgtttggttctcaatgtggctaacgccttggttgctattgtcggcgcgttctgccgcaaaggcagattgcgcgacgaagccaaggatcacgccgatgaaaccggcgagtagtgcttgtttgatattgacgatcattcttcctctccttcaatgattaccagttcgtgccatttgatgccaagcggtttagcaaggcgaaccatagtttcaatggacggcatcactttgccgttgttgtactggcagacaaggcattgagccagtccggcctcttttgcgagcgctcgctgcgacaagcctgctttttctcggtactcgtttaacttcaatttaactttcatgcttccaccttaaaacgggatatcgtcatcaaaatcctgctgtggctggccttgcggctggccttgcggttgctgcctgccctggcctgaatgagttcgcggctgactctgtcctgcgttctggccctgctggcctccgtcactcttaccgcccaccatctgcatcaccgcgcccgggccgttaagcacgacctcagtcgtccacttctcgacgccgctgctgtctgtccatttgcgcgtttttagctggccttcgacgtaaagctgggaacctttcttcacatactcgccagcaatctccgccagcttcccgaagatgacaatgcgatgccactcggtgttttctttctgttcgccagtctgcttatcacgccatgattccgacgtggcgagggtgaggttagcgaccgcgccgccggactgcatatatctaatttcaggatcctgcccaatgcggcccagcaggatcaccttgtttactccacggcttgccatgtcaatgactccttaaaaatcttcttcaatctctggtttcggcggtacatcttgcggctgaacgtcatcaggtgcaacctggacggttgccttaccgcgacgggcattcgctggcttacctggattgaatgggcgagcctccgcattcttcaactcgacgatcttgtttgcgcgggcatcctcaacgatgcgcagtgacgccttgtcaaaacggaatagctcggacgcggcgcggtagatggcgtccacctcatccttgtctttcgcggcttcgattgatttgcggcagtctgcggcgctgcgcactgacttgttgccgtcgtcgtcgtccatggtcagaccgaagatcgctaccctggcatagcgccgggcgtaagtcagcgcggagccgaacccctgcgaatctgttttagcgagcgggatctggcatacgtctgacaaccattcgccgctgtcggtgtggataatgcgcgtctccatcagcagaacgttcgcaggctgtcccggctcatgcgtcggtgactggatcatgataaggccagcgtcttccattgccgggccgatagcggcggccacgtctccgagggtcgcatagtggttttttaagtgctgattctgcttggacttcttcggcgatacgcacatatcctgggcgtgggcaaactgcttaacaataacgccgcatggttgagagaatttcatattatttactccttatggtttggggctaatatggcagtatattagccgcgaatcaattattttctggtcttgacgtcgtcccataggtggcggtacgtctgctcgaggtagaacggcggatcgaggtcaaggacgttgccgccgccatatgtcggccaggtgttattgtcccggcaccatttgaacgtagcaatggcctcgcgtagctgtgcataaccgatcatcagcgttttagtcgacatggcaaaaggagcgacaacgaacgggctgcttttctcctgggctaacaacatcgttctgcgaggcttttgaccaaatgctgctttaaacccttcgcgctgcaatgccattttcagcggatacccaaggtcaaaacacttgcggcggaatcgctcaggatttgcgctatcggtggtcttgtagtccaccatgtcggcgtgtttgctgatccagtcgaggcgaaccttgcaacgtaacccctggtagctgaaaaagatcgagacctccgacataccatcaacaaagtattccttgaagtcttcattgttgaataacaccgcgcgcatttcctggataatgtcataatcctgcccgcgaatgccttcacggtctccgcgctcttcgtttgccttatttacgatatcgtgccagaaaacgacgtcattaataccaagcgcggcggcagtattggtgacggtctctattaattccggctctttcattttcgaataaccagcaaccccgttagcctttaagaaagattttgcggcttccagcgaggtgataaagttgggctgtgggatgatctcgcctttatcatcgcgtttaataaaatcctctttctccggcatacgaaaatatgttttttcgaatagctcaggttcaaggtggttagcgtgagccgcagtcccgaacacaagggcgcgggattgctttttcttgtcttctgcaaacttccagttggccgggcaggtcgaataaagttcccacaagccggagccgttcatgtgatcgctttccgcgtgataatcttcgttggaaaggtcgttattagtgaagaataagacttcatcatctttaagagatttaatttcagacattacataatccccttttcaatatccaagcgaagttttcgttctagatcttcctgccttacaaagcggcgcgaatcgcccttgcaattaactttcaatagccatttgcttttattctcaatagccgggtatttcacatcaggatcgcggaatataatctgaccgagcatcaactctgttccagtgggtacgtcgcaaaatagcacgtcccatagcacatccctgataagatcgtttcccggctctctatatgcgagcactactttctttattgctcgcatcataccgtaagccgctttaaatgttttgcggtcagcgtggcgtattccgccgtgtaacaactctctcaattctttatatgtcatgatggcctcctgtgtggtgttcgggcatattacgtccgtgtaatatgctagtcaagtttatttgatgctaataggcgacggcccgaggaagtcaatcaccgccagcttcgcgcagtcgaacccatacgccaccgcagcgaagccgccctgtgcggatactgctgacagacattcgacctgttctttgctgactggcgtcgacagctttttgttctcgcgtttcatctcgatcacgccgaacggctcgccattgcggccgcgatgcaggatcacgatatccgccacccctttgcgcaaccccttcgcctgctggcgcagaaaatactgctttcccgccttgccgccgttctcgttcggcacatggaaccagtagacgtctggataccagtgattgaaccaggttttaaagttaaccaggtggtcatcctcaagcgtgcctacaggattggctggcgggaacaggtattctttgatcacaggtcgtctcctccttcgaaaattttacgggctatcacatctcgggacttgttcccgcctatgcgccggtgcgttactcgcttcggcgctgctatcaggtgcgcagacggcaggatcttcgtcttcaccccgcgcttcatcttccctctggtgtttggcgatgcgacgtgcttgtcaagcgccgctttccactggtgttttgctggcatactgtcgctatccggccaaaatatttcataggcggtaaagtccggctcaccaggattgccgaggacataacggaagaccacgccattaccgcacttcgtcggctcaacattgaacgagcgaacgtccacgaagtcatctcgggtatagctctttctctcaaggcttttgttggggtcaatcagcgtattcccgcagtgggagcagtatcgcgccgttatgtcgttttcagcgccgcaacccttgttgaccaccaccccgcgatcattcttgaagtcctcgcaggtcttcgagacgaaccaataactacaccgttcatctttccggtattccgtcccgtcggcctccacgccatcatgatcataaacatgtcggcaccggcgagcgtgcttgccgttaagatggccgtaggggcattcctgcgttttcccgctgattgtgtcggtctcatatcggtattgctcaaggaatggtgaaaaatacagttcagcgagatcgtccagcgcgccgccgtagtcgagcaccaggttatcctctttcaccatgcccagctcttcgacgtggtattttttcaggatccgcattccgcgcccgatgagctgaaccagcagtgtgagactgccgatcttgcgcaggataacgatagtgtcccacggtgggacgttgtagccggtggtaaggcacccgacttgaaagatgaacttgcatcggttattaaacgcatcttccagaatccgatcacgctctttctgtgatatgtcgtcggtaatgatcccgtaagtcacccctggcgggagggcggcggcagcctccttacagtgcttcttcccggcgcaggtaacgaggacggcatttcgtgaggccgttctcttcaccacgtcgagcatgatgttttgcgtcaacgtcccttgagaaaggatctgcctctccatctcgatcagatctgcgtcactaaattcgtcgtcaccttcctcgccacggctgacgaaggaatccagctggtaagtaagatctccctcaatcgccccgtaatgggtcggcaccaccgcgccaacttcaacgaggtattccgtggatatgtcgcagaccgcgcgacgccagaatcccggcgtgctggtgtcttcattgatgatcggctgcaccccgcgatagtctgtgccggtatacccgataaccaccaagtcgcggccatgcatctcgcggcagcggcgctgcaattcgcggatcagcaacgtgtaaccggttcgcccggcggcgaccatttgctgcaatgtgcgctctgccttggactgcaagagttcattttctggattctcatccgccagctggcaagtcaattcgctggcgacaatgtcatcaacgttgacgtgctggcattcatcgatcagcaggaagcgcggcacgaagttagccagttgcttctcaagggcgttgaccaccgtcttctcactcccgcagatgataggaaaggtggtggacttcatgcgcaggccagcgctgaacacgctgttctccaccccaaagttccgtatttccacggcgttctgtttgatgatcccgccctggcgggagatgaccagcgcgggcttgttcagttgggttaaccggcgcgccaccaggctgatcagggtggtctttcctgccgacactgccgccttcacgatgaaggggccgatcttgctgtaattgttaatcgcctgcgacgtggcgaagtgcgccgcgtactggaacgggtaaggctcataaggcataccgcgcagacctttaagaagctggccgcgcagcgaatcaatgtccgtttcctcgatcatttgcttaatgctttttatcttttccatttgccgcctcgttgacgtgtcaataacgttgatatattctgcacaacgaataccaaaacacaaggacttttaaaatgatgaatatcggcaagcaacccgatccagaaataaccgagagtgcgctgcaacgggccttcattcgctgtatgggtaactcgtttcagatcatgatcccgaactactacaccccggataacctgggttatgaggcggacatgttctgcatacgcaagagccgctacacggtggaggtggaggtgaagatctccatcgctgacatgcgcgcggacttccgcaaggctcacacggtctaccccaagaccgtcgaagattacaagcagtattggattgacgatagcgggcgacacaagccttacccggtgaagatgaaacatgactgtctggaagccggagaactgatagccaaccggttctacttcctggtgccgtggactatcgccgacaaggcgcgggagatcctgccggattatgccgggctttacgtgttcaatcagcgcggtacggtacaggaggataaggttgggccgatgcttcacaagcgtaagctcgatccgaaatatgattgggggatcatgtctaatctgaacgcccgctacctgcggctattgaatcgccaatgaagttttatccggtagaacagatcgagcgcctcatggtggggcattgggagttacttctatctcaatactggaacaagcgcgcattcaacggcaggcaccaaccttgcccgctatgcggagggaatgaccggttccggtggggtgagtcgaaacaggacgtcaccatgaaggggcgcggtgctgcaatttgcaaccagtgcggctcacatcttgggctgtggtggttcatgcagacaaccggcctcgacttcccggctgcgctgaatgagatcggggcgaacttcctcaaagtcgagccggacgaagatctatcaagtccgccggtcgaggcccgcgagtcattcccgaaggcaccgagaatacggtttgaagaccggaagcccacggcctcgcagaagtacatccaaaagcagcaagccgcgccggattatgatcgccgcttttgggaggcgttcgacctgatcgagacgatgcggaaatatcacatgtgaaatacagttgacacggggtattagtacagaataatatcccctgacaccaacaaaggagacgcaaaatgttagaacagaccacacttgcaccgaaaaccgcagtagaaatggcaaagcagatcgtcgaagccattaatcgcgggcgaatcccggttatcgttgccgatcagccagcattggcgcacatcatcgcagaccacgccaccgacgacccggtgacgattaattccgtgtacaccgacagcgccgtgatgaaggcacttgtcgaggcggcggcgcacaaaaacactcaccgcaaagtcggccatatcctgatcatgaaggcagacaaggccggtgccgggacgttcagcggcaagcacttcgtgaagatcatctctaagcggctgttcatcaccgtaggcagtgtggctaacctgctggtcggtgaggactgattctatggcgacaggctgcgggaagatgatcaagggcagcgagcgcggaaaaatggtcggctgcgggacatacttccactcgggcaatcgttccgggagatggcacgttatcgacaacgtggtggtgtgcaaacgctgttacaaattatggaaaaaggagcaaagaagtgaagaaagcaatattcctgtttaaccgctcgcggtacatgttgcagccgtggcttgaagctggctatgagtgctggacgttcgacggccagctaccggatggggtgaaaaatccagaacctgggctgtatgaggtcggcatgtggttcgacgcctcagctaccagtgtacacgccagcgacgtagccaggatcgtaggcggtggtgtgaagttcatcgcctcgttcgcggaatgcacatacctaaccaccaccggcgcgcgttggctgtaccatcccgatgacaaggatctgccgattgatgagcgccgaccgcatccggcataccctaaccgccgccgggatatggatgacgctgtcaagctggcgaagttcgtcgagttggtggaggcttactgccatatcgttaacagtgatttttccaccgggcctatcccctggatgcttgagaacccggcgcgctcattccttccgaagctgtggcgcaattacgatcacaccttcaacccttgcgactatggcggatacatcccggaaagtgaagagatgcacccggattacccggggatcatccccgaccgtgatgcctataccaagctaaccgggatctggtgtagcgattcgttcgtgatgccagaaccgaagccggttatgccggtgggcaaggactttaaccgggtggtcaaggtcggcgggaagagcacgcgcaccaaaaacatccgcagcgccacgccgcgcggcttcgctctggctgtcttcgaggctaaccaccatgaataaattcatcatgccgctggaagattacaacgttttcgcatcccgcgaagagacgaggatgatcaccgtcgagatgccggagatcggcccggccatcattagctgtgaagggaagccagatattcgcgtgaccattcgcaaggttgcgccgctgtatctgaacgggaacacgtttcacattagccgcattgagtaccgcacattttcagttaagggtgagaaatgaaagacgaagcagacaaagttactatcgacgcattcaacgaagaccacaacccggcgctgcacgcggaagccgcagcaaagggacttacgccgtggcaactgttcagcaatcgcatgtgggcaaccaaggcgctggcgactggcggacactatcaggccgttctccctcagaaagtaaccggccgccggttcaacggcagcaagaccccggataacgtccgcccgaactggcgtacccctgaacacgtctttgcgtggctggatctcaccttcggcccgttcgaggttgaccttgcggcctgcgagaagtcgacgaaatgcgacttctacttttgcaaggaagagaacagcctggcgcaggattggagccagtttgatgcgatgttcctcaacccgccatatgacaacatcacgccatggacggagaagagccgcgagatcaagccgggatcggtgctggcggtggtgctgccgaacgataacagcacagtgtggttccgcaatatggtggaacaggcatacaccattatcaacattgtcagcaacggcaaaaactccgggcggctggcattcgagcacgctggcaccgggaaggctggcaagcagaacaacaaaggcaccgtgatcttcatcttgcgcgggcgtaagcgtcgggcaggggtcgagactctttacatcgatcaggatcagatgttacgcgacctcggattgctggacgatgcacagtaaggcgcaggtgtggcaggccgcgaaggattgcggcctcgacgagttcattaccgccgtgtcgaaggcgtttcccggcgctattgatggcgtggcgatatcggcaaaagggtgtggcgtgctggcgacggatgaacggatgcttcgccgtctcgttagggttaagccaggggtcacgctcacaaaacagcaggtcaaagagataagggcgaaaactggtgttactatgcggtacaaaggggataaagaagagaggtaacaccagtggggaagacataccagcgtcaccgggcgcgcaacatgtcgagagctgacaggctgcgcaggatgcaccgggacaaagtgacaagggttattacaaaatacatcgccgggacactctcccggcttccagaaggagaagatcatgacattagcacaggcgattttaaaggcagcaagcgaggggcgagatctcaagattgggaaaggcgttgatcgtgagaacaagcacataggcccacggaatgggaagttctggactgactcacgcattcaggaagtgaccgaggacgtgacaatccgccgcatgacgaaggcgcagatcctggagaagcacaacctgacggaaagcggcttttataatgcgtgctatcgcttcgggatccctaccacaaaatgaaaaagcataacgttattcacatcgacacggcggagtttcacaacgccgtttacatcctggggcgcgaagagaagatctataactggaatcagaacgtggagttcagaaagcggttggtcggcctgttaggggagatcgcagcagcgaagcacttaaataacattcacggtcgtaacaggatcgttatccccatgggtgttaatgcgcgaaccggcgtttccgtcaatgcatttggtcaaggtgacataatgacggtatcccgcgtcggagtgcgccaccggcagattcacatctacgaggtgaagtccaccgagggcaccggcaagcagctaccgactatccggcaggacaacgcggaaagctatattgccaacggcgttgactcgatcattctggtcgctgtccatatcaacaaggcgaaggcggagtgtcggatactccatcaagtgtctccgattgaggtggtggaacgctggcgaccgatgcgcaatcgctacgggcaggagtgctacgctttcaactaaacatgttttgagtctattatggcccccatcaataatacgggggcttttcttttgggcgacttcttccacggcatcaccgatatttatcggatgtataagaccgatctagactacccattggctgcggccgtcatggctacattgcggcatatccagttaggccacgacaggcgacaggtctggactaacgcgatcatggcggcaatgtttgcaaagggtatcacctttatcatcaccatcatcgccgactcgatccccggcatgggctggatcgccgaccgggacgctggctggattgttgcctgcctgctgggctatgtcgggatcgataaggcgatcaagatctctgaaaaatactttccatccatgaacttgagaggaaaaaaatgatcggcaatctcaagatttacctgctggcggcgcttgccgcctttctgctatggcagggcggcgcttatgtcctttcgcagtatggcgaagcaagatataacgacggcgttacagctgggaagaaaaaggaggctgaacgcagggaacaattagaccgtgagctggccgtgaagcgccagcgggagaaagaagaagatgaccgggacacgaatcgccggattaacgaagcacgcgctgacgctgctagtgctgtttatgctgctgaccggttgcgccagcaactcacagccgccactaccatcgcaagacaacacgccgccgctgtcggagttagcggtgatgccgccacgctcgccgatctgctctccgagctgttctatcagtcagtgcgagcgggtaacgagctggcagaagaagctgatcgatactacatcgccgggcagcgatgcaacgtccaatacaaccgactactgcaacaaaggagtaacaaatgaggatgagtgataacgggctgcaattcaccgcagcatgggagcaattccgaagcgcgccatacttcgccaccgaagaagagcgcaaggacgggatctacacctggggcttcggccacaccggccgcaaccctccgcgcatcaacatcacccgcgaggcggcgctggctatcctgcgggatgacgtcgcctatgcggagaaaaaggttaaccagtgggcgcacaagtccatcacccaacctattttcgacgcgctggttgatctggtgatcaatgccggtgaagagccgatccggccggacaagaaagttggcgactttgacgatctggtgacgcaggggcgatgggatgagctgatcgtacagctggagttcttccgcaagcagaaagggaagattgttcccggtctggttcgtcgcgcgctggcgcggcaggcgctggcaaagggtatgagctggcaggatgcggaggccgttggccgaaacgcgaaggtgtaaaaaaaggggccgctggccccttcttgttatgcgtccatgtcaatcaaggcaaggactctttctgttagttcgcgctgtgcatcttcgacagtctcggggccgccgatgctcatcgtgatatcttccacgttggcgaaccagtccgcgatctcatctgcaatgatgcaggccagttttaaatcgtccatcacttcatcccgcccgcgatctcagcgccgatagccgcgtaccctgcgagatcttcgaacgagtcagtgtcttcgtcggtctgggcgcggcagatctttaaaatggcttgcagcgtcaccacgtccagggcggtcagtggcatgttctggcggttggcggatgcgcgcacgatattgaatgcgtcggccacgcggtcaaactggcgctctttcccattctccgcgccgtagcggcgacctctggcctcaagatgaccctttaccttatccagaacttgggcggcgtccagcgcttcctgtgcgctatcagggcctatctcttcctggtggttgccagcattgagataagccgccgtctcgccatcgcgcgcgaggtcatggttgacggtcgcaatgttagcggcagtcagcgccgactcatctgcgacgccgtgatgggtgaagaagttcgtcgggaactcgatcacgttcggcatatagctttctccgctttcatccatgcagatccagcgggcgattatcgtctcgacgccgttgatctctgaataggtgatgaactccaccagcgaaccacggcccgggatattgcttccgcgcagtggctggccgccttcgctcacttcatagctgaatcgcagaatgtcgcccggggtgaagcggtcggtaacatcggctgtttttttcttcttggtggtcatatctcattcctcagcattgcattaatgttttgcgccagtctgcgccttcaaggtcgacgtaacataacagatgtggggtgccttctacactccaatattcattacttccacaaatgaacggttctgcgtcgtagacgtagaccgcgccatccatatcgaccgcgatccacttcgcccagcatggtgcggtcatcaccatgccgtggtaattgaatgccttaaatgggccgttcgttatctgaatcattcatcaccttcaaagtatggtacgcgtggagtcgtcaccggcgcgtaggccaggatctcaacctctccgaccggctcatagtaggattcaaactcggggtggattccttcacggcaccagccgacataaagaaacggttcgccgccgctgtcggtgcggccgtcccacgcttccagctcttcgtcggtgtatccgccgtcgtaaaagttcacataccaaaaccggcggataaggcgcgcgccgttgcgtaggcggacaacaacccaaaactccatttcgtgcccatgctcaagatccggcgcatcgccgagcgtccacgttgccggtaaatgctgttcaaaaactggctcaatatttttcatttgcaaaagtcctctacgtttatgaagtcgggggtcatgaccatgtttcccacacgaaggaagctcaggctgaaccggtggatcagcgtgctgcactggttgatttcgctgtagttcattcgacgccagaagcctttcagggtgccgacgtcgtcccagcgaacttgcgggcggtcgatgaactcagcgcgaataaagcggccatagtgccatacccattgcccgggcttcacgtcctcgacgtctacgagcttcgttgggaatgccggtatcttgctcatttgcgatccaccacctggccgaagtacccgacgtcgagaaggtcggagacgatggagacaagttgcgctttcgccacgtcgtcggcgcgttcgttgctggcaacggcttgcaggacaccggcacgcattgagtcataggccgcctggctcattccgccggtcttataccggttgcccagcttgcaggcgtctttcatgatctggctcattgatgcgtcgaacggaaggctgtcgtacatcccgagattgcgctggttctggatgttcttaatgccgaccgcgcagctaacagcgcccgcttccccgacataagagcaacccagcacagcagcggcggcgatggcaatggcagtgatgcgtttcatggcttactccttgcttccacgaatggcggccagtgtttcaaggtggcggcgctcttcctggcggcggcgctcttcgtctgcggcaacgttgcgcatcaccagcaggaaaaggatcgccagcagcggggagaacaccagcgccagcagcgcccagccaagcccactacgcccgcgacggtcagccacgatcccgaccagtaaagccataacaccccaaataattaataagctcatgattttctcctttcagtcccggccccatgccgggaactgcatattattagctgataataatagtgtcaatactatttaatcatcccagcgccgtgctggtagaccgtgctgatcgtgagtagctcgactcgaagtgctttcagcgccccggctgctgtctttgcgtccacctctgtaacgtggttgcgcgaatcggtgtaagccgccttgaatcggttatggctgtaggcaatgcagcgcaggcggccgaactcgacgaggacacgataggtcgtttcctttgtcttattgttgacggcttccagtacggaaaacttcgcaccgtccaggatcatcgagcagatgtgcgccccaagttcccgggcttcttcgcgggtggcaatctctttgacctgatcaatcattccgggcgtcctcctgcggcaagccaagcggcgtaagcgattgagcgcgtaagctcacatttcatcgttatcttgcggtcttcgtctgcgttgacccactgcgagaacgtgaggttcagcggcagcggcttaccttcggcagcggcaagcgcgtgatggtagctgttcagcgacaggagaaacgcgacacgctggcgggctggcatctcacgcatgatcattcggacgcaaagcgtcacactgccggccccttcgtgcttgcgctgcccggcgtcccaaaacgagaatttcattgatagcggtggtctctttctggcgtccatcatgcaccccatgcctcgttaagttcacgtttgatctggcgcatggcctcgacgatcatctgcgcccgcgtccctcgttccccgtcgacttcccacgtcttagaaccgtaataagcctgttttacgggccggatgaacccgctctttttgtgcttaacgtagaacaagctctttggcggcctgctaagtccgcgaatctttctgtctgtcgtgatggtgaatccttcctcagttgccatatcaatagcggcctgaatagtgatcatgttttcctccagctggccccttgcggggccggattggttagatggttttcagaactgaccagaactccgcgctggtcttacagtctgacaggcgggcgaaagcggccttgctgtaatcgtcgtgggattgctcttcgaaaatgcggcattctgcggcgatgcttttcagagtgcgcttgccttcgccgatagctttaatgatgctcaggatagtgttttcggtggcgatgcgttctaagttcattgtctgttcctcatttggtcggtgcataaatactatatatgcaccgactaatagtgtcaatagtatttatcagaacggcagctcatgatcgatgcctgttaccgccgggcaggacagcatctcgatgtattccttccgggccttctcccgcgcctcaccggccaggcggcgcacgctgaccatcatcttaacgatgaagcgggccgggtaacgttccagggcaagcagttcctggcgggcgcagtcaacggcgcgctgaatgccgatgtgtgacaggttgtcgttgtgggagtagcaacgagccaccataacggcaccgtcaacgatgtcgtttactttcagcgcttcggcgtggtctttctcgcgggcattgtaggccagctgaccattaaccatctcagccaggcgggccagttcggctttaacgtcacgcgcggcccactctttctggttccagctttcaaggttggcctggatgtagcagtcgatggcgtcctgcatgtcgtcgaacatgttctcttcgaaggtttccgcgttctcagattgcagggcgtttgcagcggagttgatgatcaggcaggccagcacgtcggcgttgcgccagtttttacggatatcggcatcgttgatcatgtcgactttaacaaccagaccaaggactgccagaatttcgttagcgcggttcagagatttgatagctgattttgacattttagaccccttaaattttatcggttagttactgcctgttcgataaatatattataggggtctaatatagtcaatagtatttacacgtctctgataaaatctttgaaatctgcggacgacgtctcacgccaggtcatgagtcggccgtttacgatggcgtgccgttcacagttgtagtcctcgcggaattttaggatcgtcattgtgttaatgccggtcttcgacgacagcttgcgcatactgccgccagctttttcgagcattgctggaatgctggtaacgtgacaaatcaggctcatggtcttctccttaatgattttctcgacagcttcccatcaatggcgggactgcgtctcttactgtgtaatacggatcgcggatggcgtcggggttaacctctttgctcaggtgctgtaattccgtcatcttcgctatggccttgcgaacggcatcttttgagtacggctcgccgtcctcgcggtacacgttgccggtgatggcgtcgatgatctcccggtagcgtgccgtcccgttctgctgtgcgcgaacgtagcggtagacctcttcctgcaatggggtgtagaaatgtgcctggcgcttctcttccggctcgaaatgctcatcttccgtgcctgcgtccatgtcatacacccgatcctcgaagatccacaccttgctcgcgtcgtcgatatagataaagtccggccggtcgacctcctgccctggggcgaacttgcgctcatagaccgctttcttcttcgcttcgatatcctttgcgaacaccgacacctgaaagcctttcagcttgaaccggcctttcaatccgccctgtcggctcttccctacgttcaggatcgtatagcctgtttccttctggcgggcgttcagtcccttgccggtctgcgtcttctcgcgtaccaggctgaaagtcttatacaccgcgcccttcgctgccgacccgccgcgagactcaaggtcgtactggccggatagcagactgcccttgctgacgtgggggatgaagatcccggcgcaattaagcgactcagcgaaacggtgcccggccgtggtgatcaactgctggtcggtgttgctgttttcgtccatgctcacgccgttattgttggccgccgccaggtggaacatcttgctgtcgaagatcaccaggttaaccgggcggccgttggcgaactgcatcacccggctcttctggatcctcagcttgcccggttccatgaggtcggctgggcgcttaaacaccttgatccagtcgcgcaaattgacgccagtgcgcagcgaccaggcggcaacctgcaactcgacgctgtcggggtcttcggtaaagaagacactcacgcccggattgcatacccggaagcagttaaacagcgggcgacccatggcaaggctaaccgccatttgcaccagcagcgtcgttttacccgcgcctgcgtcaccgttgatctcgttgatggttcggcggttcagcaacccctcgatcaccgggtcgtagaagtccggcgaagtgttcagcacgtattcgcccgggtcgtagtccttgagcgctggatcctcaacaagcccctgctcgatctcttcggccaggcgcttcgcaacctccacgcgctgggctgacaagtccatgccaagattctgcgactcgttctcttcgcggacgatgcgctgtagctcaagatggcgctggcctgcgtctttcttcttcggcttcggctgctctggttcggatggcgtggtgtcttctgccatcaccggctcgggtgcgctggcttcctcagcacgcgccacctggtcgaagtaggcttgcatgtccgccatttcctgggagtaagcctcttcctcttcctcgcgggtcattggctgattgagtatgtccgccgcttcgtgctgtctgtcctgatcccctaacaacgctttccagtcgtcgggggtcaacggcgctttattgtcttcggtcatttgtccctcctgtggtgagtccggccattattcacagcggataataccctgtcaacatcattgaccagaaagcaggtcgttttccgccaaaattccgcgaaaacttgtaaactaagcagtgcttatacaggtgtaaatatcgttgtgtaacaccatcattttattcaatgttatcatgcacttatcgctgcacaatatttgctcacctgtaaaccatacagtagttttttatgttcacggatagccttcattgtccgcgaacagcacccaaaaatgctaactcattgatttacaacgattcactgttcaaaaacacccctttccgcgagtttccgcgaaatcgtaagcggttgaaatataaggtgtaaattcacggactacggacaataggcttatatatatttattacataaataaagaaaacacgtttagaccaatcaataggggagtaataaaaaagcgactccttgtatgtcgcgcttttattattaccccccatgattttggtttaacatacgggtgatagtccctgaacaaaggagaagacc

SEQ ID NO: 33 - DNA, 48561 bp, unidentified
  source 1..48561: mol_type = genomic DNA
atgggggaagaaaaaagcgctacgcagtggctgcgcgtttttattctccccaccatgccgtataggggtaaactgaggcagagccacttgagagaggaaaccaacatgactgacaaggtgaaggtgacgacaccccgaaacccagtcggaagacccaccagctacaccgaggacatgcccgaagcgctgctgtcgttcttccgggtagacattgacgacattatcaaacacaacctgacatccgcggggaagagcaacattcgtatcgacccgaagcatttgccgtccatgattaagttctgtgaatccgtcggcattcatcagtcaacgcttcacgaatggcggagtaagcatacagaattttccgaggcttacgcgcaggcgcgccagctttacgagcaaatgatcctggatatcggatttgccacgaacagcactttcgcgaccttcatgctgaaagcgaacttcggctaccgcgacaacactgagatcgtcgtgaccggtgacgcgaacaagccggtgcggttgaagatcgtcagcgagcgaccgaaggatgagaagccgcgcgaggagtctgaggctgtcgactggggcgatgactaaatactgcttgacatacctataactgtgcaggaatataggggccgggcaatcccgcccctactgcacaggaatcatcaacatgacccaaccactgaatttcacctccctcgcgcctgctccggtcggatgccttctcgattgcgcaaaaactggcgacgcagcaaacaacctaaaactcgcccgggcgattgacgtcgagctggacggccgtggctccgagcagcacgtgaagattaaggttggcaccctgcgcgtgctggttgagtccatccagtcactggataagctgagcgcatcgcttgaggccgcactggacgaacgcagggaagagctgatcgaggtgcgtgacggactgattaaatggcgcacatacgccaccaggctgctggctaacttcttccagacctacccgaccgtcgacaccaacgacgacaacctgcgcctcatgatcaccgcgtccattgagcacgaacagcgtaagctcaaggcggtgagcaaagagcgtgatgaactgcgcaataccgccagcgccgcagaccagttgcggaaggccgctgagctggagcgtgacgacgtgattaacctcaaccgcaacgcagcggaggagatccgcagtctgacagagcgcaacggccagctcgatctgctggtcggcgaggtggcgagccagcgcgataagaacgggcagcatgctaaccaactggcctgtgaggtcaacgacctgaaaaagcagcgtgagcgcctgacacatctcgccgatgactaccgccgcgagctgggcgcagcatcacgtcgttgcgttgcgctcaccaatgacgcgcaggcactgactaagcagcgcgatgaagtgactaccaggctggctaatgcgaagttgcagatcgcagacctcaagcgccggttagacggtgaagttcagcagtcggctgctgtgtatgccaacatccgcgcctactccgaggagcaggagggtgccctattactgcgcatctccacgcttgagggtgagaaccgtcagctggcgaccaacctggctaacgctggtctggagatcgccagctataagctactcgcggaagacctgaaagcaggaactgccgttgaccgtgacacggtgaagcgcctggaagagacggtgcagcgccagtatggtcagctcaacgagtggtatgactgggcctcagacctcatttgcagcccgtcacaactgggcggagagggtctgcgtaccgccattgcccgggcgatgaagaaacgcaaagaacgtactgagcacctggaagcggctttgaattccgtcactgcacagcgcgatgcgtgggttatttgggcgcgtgagttcgccgacgcaccggcaggcctccacaccacggaacagctcattgccatggtgcaggagaaggtgaaaggctcacggcacaccacccagggcacgctgaaagtcaccaagctgaaagaggatgtactcctgacctctcgcggctggtgcaagatgcaggatggcaacgtgacgatacaaaacgcagtgattgccagcggtagcattccagccagcaaggtcaagttcagcgaggcgatggaagatgccatacgtgaactgattcagaaagaactgtccccaatcaacggcgcaatcgcagacatcctttcgaagatgcgcaaataatccacctaccggcccctgcgggggccaatgaggtctaccaatgcaaccctattacccaatcattagcgccgttctctgcctgttctgcttcctctgctgcaaaggctggtcgacagccctggatatcggcgctgcaaacgacaagaatatgcgcaggctggcatgcaccctcgacatcgctggcgacgtgttccactgggcgggctgggcgttcgtcgtcgctggcatccttcgtgccctcggattgttctgattgcttacactttgtaccacttgcccggttgatccccggagcgccaggctgatacgctttccgcaggctcacagagaggtagcgaagatggggatcgtaatgggtgtatggttggcgctggtgacagctatcgcgatgatcgcaattcacatggccgcaatggacagggagcgactcaaggccaacccggccagccagatcaccaagctggtgcttgcggtcttcctcctggtcggcgtagcgcacatcgccaccaggtacacagctttcctccgcgtgctctcataaccgaacacctgctatcatggccccgttaacacaacggggcttttttatgtctatccaatccgacgccagtcaattcattgacctgacactcacaccaccgcagaacgactttctgcaattgtcgtgtaaacacccggcattcgtggcgggcttcggtaccggcaagagccagaccatggccgtgtcgtccgtgctggacgcctcagagggcggctccgatgctacgatcgccatccttgagccaacattcgacctgtgcaagctgatcgccgtgccgcgtatagagcagatcctctccgaactgggcattcgctttaagaccgtcggcaacaaggagatctacacctcccacggcgggatcggtgacttcctgtttcgctccatggacaacccggctcgcctggtagggtgggaggcgttccgcattcactgcgatgagatcgacaccctcaagaaggaggcggccaaaggggtctggcgcgcagccatcgcccgctgtcgtcagtcaccgaaggagtatgagccgttcgacttcctgcccgccgaccgcccgctgaacagggttagcgcctactgcacgcccgagggattcaacttcctgtatggccgctgggcgaaggacaaggagcgcagccgaaaggctgggtacctcatgattcaggcggccacctcatccaacccattcctgcccgtcgactacctggatgctctgcgcgccagctacgacccgcagcgcttcgaggcctacgcgaaggggcaattcgtcaacctgaaatcgggcacggtctataagaactttaagcgcgagctgaacgacaccgacgtggagatcatccccggggagacgctgatcgtcggccaggacttcaacgttaacaagatggcgacggtcatctacgtcgagcgctatggcgaggacgggctggccgaactgcatgcggtggacgagcgacacaacggcatcgacaccccggacgtcatccgctggctggtcgagaagtaccagaacccgggcaatggctacatccacccgatcgaggtctacccggatgcatcaggcggcaacaccagcagcaagaacgccagtatgtccgacctgtctatgctcatgagcgccggtttcgacgtctactgtgggcaggccaacccggcggtgaaggacagggtaatcagcgcgaacacgctgttctgcaacgcaaccggccgccgtcggttgttcgtgagcagcaagcgctgtccgcaattcgtcgaatgtctggagcagcagatctacgatgacaagggtaagccggacaaagaggcgggcaaggatcacatgaacgacgcaggcacctatccggtggtctataagttccctgtcgtgcataatggcacgatctcagccaataatatcgaatgggtacgatgatatgacgatctcgaccatcccgcaggcgggcacggtatctaccgagcacccgctatacaagcggttcaaccaggaataccgcaccattgaggactgcgtcgcagggcagacggtcatcaagcgtgccggtgttctgtatctcccgaagcccgaagcgtggacgatgaagcgctacaacgcttacaagcgccgcgcccacttcctgaacgccacctaccgcacgcagatgggtatggtcggcatcgcgttcgccaagccagcaacctacaccctgccgacggctatcgactacctgtcgaccgacatcgacggcgaagggctggatatggatcagctggtgcgcatgtgcgtagcgcagaacatcaccttcggtcgtggtggcctgctggttgactacgactccccggaggacatcgggcaggtgactacgctggtcaacagcggccgcgtgaccatccgcatgttcgaccaccggcagatcatcaactggcgcaagagcaagggcaagtactcgctcattgtgctgcgctacctggacgacgtcgactatgacggcttcgagcactatcaggtcgtgcgctaccttgaactgcgtctggtggatggcaaggcctactcccgactgtggacggatgagttacagggcgctgccggtctgccagcgtcgatcatccagcaaaacgggagcatgaatcagcagcagcctgaactgcgcccgatcatggcccgcgggaagcagctcgactatctgccgttctgctggttcggtagcgagaagaacgacagcgacattgacccggctccgctgtccgacatcgcgaacaccaatatcgcccactacaacgccgacgccgacaacaccgacagctcgtttatctgcggccagccgacgttcgtgatcgccggtgtgcctcagaacttcgcgaaggacaatccgagcatcaaggtgggtggtgacgaagcgatcattctgcaatccatgggtaccggcacgccgaccgccagcatggtcgtcgcaccaccgaacactccggcggctgcgctgctggagaagcgtgagaagcagcttgccatgctgggcgctaagctggtcgagcgcaacggggcgacgaagaccgccacccaggctggcgcggatgagaaaaccgacaactcaatcctgtcccagtgcgtaggtaacgtcgaggccgcgtttaatcaggcgatggagatggtgaaggacttcaccggcaccgagggcgctaacgtccacatcaacaagcgctatgaggacatcgtacttaacccgaccgaactgacggcctacatggcggcggtgcagtccgggatgatgcgtatgatcgacttcctcgcatggcagcagcgcatcggcctgatcccgaacgatgtcgacctggaagacgtcgagcaggagctgaaagacggggccgaagagacgcagctgatctttaacgccgcagctcgtcagacccaacaggggctggataacccgccggacgaccagaccgaagaggacgacccggagaaggacaagccgatttccaagaagaaggccagcgcgccgaagaagggggctaaatgacatccgttaactcgcggatggcgtctgaggcggtaaggcaccgcctctacctctaccgctatagcgaaggccaggccaggaagatgacccagctactgcgtcgtcttgccgtggacgtcgtggggcgtctgctgtatgcgctggacgactcgaagatcaccgccgacaactacacggtgaagcgacttgaggccatcaaagccgccattaaccctacgatcaaccgcatctacaaaaccacctacggccagctgaaagccgaccttgaggcgctgagtaacggcgagctggcgtaccagtatcgcacgtggcgaacgctcatcccgaacccggtgctggacttcgtcggcggactggtggagatccctgaaacgcaggtgtgggcggcggcgaacagtcgcccgttccagggcatgctgctgcgtgacatcccgtctgtgctgggtgaggccatgaccgactcaatcggccgggcggtgcagcagggcatcttacagggcgagacgtatgaccagatcattcgccgggtcaagggtagtgcagcagcagcctacaaagacggggtgatcggcaccaacgagcgccacctcgccaccgtcacccgcagcgcagtgtcacacgtcgcagctgaggcccgggacaagatcggcgaggccaacgcaccgctcatcaagtccgaacagtggctatcgacgctggacaataagacgtccaagctgtgcatcatccgcgatcagctcatgtacatgcgggacaagaagcatacgcctatcggccatagcgtgccctacggcgctggcccgggtcggctgcacatgaactgtcgcagtacgtccaccttcgtgttcaagagctgggaagaactgggcgttccgggagtcaagatcaagggtgcgtcgcgcgccagcatgaacgggcaggtaccgatttacatggactattcgagctgggtagagcgccagccgatgagcacgttaacgcaggtattcggcgtggagcgtgcccaactcatccgcgacggcaagatctcgccgcctgacctgttcaacgacaagggggagtatttaacactcacccagcttcgcgaccttgaccgtatcccggcagaagactaacatcgtgccgttgacaacacaggagctatcacatgtggaaatatctgattaacaaagaagcgtttgacgccctcacccctgaacagcaggccgcatacaaagcagcaggcactaccggcaactacgtgctgaacattgaaggcatgccggacatcgacgccatgcagcagcagatggctgacttacagacccgcctgggcaccatcgacgcagagaaggccgccgaagcagagaaggcacgacaggcagcgcttgacctggcgaagaagaacggtgacttcaaaaccatcgaagaggactataagcgccagatcgccgagctgaacggcaagattgagggcttcggtaagcagcgccgtgatgacttcctgaacgcgcagatcgacaagctggccgccgagctgggtggcaaagagtatgccgcgctgttcaaaccggcgttgcagcagcgcctggctatcgaaggcggtgaagacgggtctgacttcatccctcgcgtgctgaaagacggcaagccgtcggcgatgtcgctgaacgacctgatcggagagttccgcgaagacccaacctataagccggtgtgcgtagctcctgcatcctctggcaccggacgccatcaggcaccgaccccgacgcctcctgctggcgatcaggctaccggcattgacgacgtgcgtggtaagcagctgagccgcgcagagcagattgcggcaagcatcagcgacgcagagtaagcacaggcccggcattgccgggctttttcttgcttgaccagtagttgccggttatcatccagacgtttaatcactcaaaggacatcgcgcgatgagctttacaatttttcaacgaaaactgatcggtaccaccgttcagctcctgactgagaatctgaacgtgttcaacgcggcttccggtggcaccatgctgatcggtagcggcgaggtcatcaaagaaacgatggagaaaatgaccatcggcatcattgacggcctggtgcaggatcgcaacgaacacgcccccgttaacaccgtggtgcagccgaaggtgctttcccgcatccttggtggctccatcaactccgcaggccgcctcgggccggttgccatcacctctggtcaactccgcctgatcgagactgacgtgaaccgcgcggcagctgagatcgcaacccttgcctccgaagcgatgttgaagcgttacgtcaccgtcgcaatgggtgcaggcgttgctgcgatcgaagcgttcggccagggtatctacacccaggatgcgaacattaccagcaaggccggtgagctgtatccgaccgttgaggatttcccgctcgcggcgtccatcttcggcgaccaggctgacctcatccgcacctggtttatgtccggcacccagtgggcgaagttctccgcacgtgaagcggtcaagtccgccaaactggtgtttgagctgggcaacatgaagatcttcaccgacggcttcggtcgttcgttcgtggtgtccgacgcggccagcgctggtatctccgcagcgacttccggcggctccgcgatctacgcgcctgatcaggcaatcgtcggtctggcggctaacgccatccaggtcactactaccggcctcaaaatggctgctgacccggctaagctgggcggcgagaacattgaaagctggtggcagggcgagtttaactacggcatcgccctgaaaggcatgcgtcctaccctggcgttccgcaccgccaccgaaggcaagaaaactccgactatggccgacctggtcaagaaagagaactgggaagccgaagtcggtgaaaccgaccgtaagccggttggcaacgacgacgatccggtagcaccgtcccgcaacgtccgcgagacgctggggatcatcatgaagttgaccccgaccgtgctcccgtcaactggcggtgaagcaggtggcggcgcgtaagctgtcgtgatttaataaaggggcttcggccccttttcttttggagataaacatgatcggcaatctggacgacctgaaagcattcgcggcggccaacggctacacggatatgagcgacgaagagctgagcgtcgcgctccggcaggctaacctatggctgtggtcactgtcgtggaagggtgagcaagtcgaacccgggcaacctgacatctggccccggacaatctgcaacgacaccagctgtctcgacttcaccaccccgccggaagtaatccgattcacctacgccgtcgtgtgtgacgccgtcgactcagggacggaattcaacaccgcatcggctggcgggtacaagaagcgcacacggatcgagggcgcgatcgacgtcgagtacagcgagcagagcctgtataacgctggattcgaagcgccttacatgatgggcatgatcgggcactggctggaaggcaacggccgcggctgtaacgtcaagctggagcgtggctaatgaacaagctctatcgcgaactgcgggctgaggcccgcaagctgttcaaggagtacggcgcagttatcaccgtcagcacgccgggcggcatcggccgtgacccgaacaccggcgaggaggtggtgacgcctccgggcgtggtgtgcaaggtgctgggcgtcatcactggcgtagaactcaagttttgggggctggcgtcaatcccgcccggggagcagcagatcgtcatggcgtggacggacactaccggacaggagtgggagccgaagatgaacatgaccatcgcaggaggcggccgcacgtactccatcaccgagattaagccggtcatccccgacggtggctacggcatcgtctataagctgaggatcaaggggctgtaatggcacgcaagcggaacggcacaacctttgccgccaacgtcgagaagtgggctggcggcgtcgtcgagcgtcacgaagagatcgtgcagctggcggccatgaaggtgttcgcgatgatcatccagcgctcgcccgtcggcaaccctgacctgtggaaccgcaaccagcaggccgtcaaggagcgcaaccgcatgagtgatctgcgcacggccatgcgcgaaagcgacaccttcggctacacgaccaagcgcggcacccgtcgcctaaagccgggcgcgaacatcgttgcagcaccggcgaaattctcttcccctgtggggccagtcggcccgcgtatcccccgccttcgcaagaacgagcagggcgtgaaccctgtcggcaagggctacgtaggcggccggttccgggcgaactggcaggtggggatcgacttcatccccattgagtggctggatgagcgggacaagtcaggcacaccgaccatcaacaagatggtgaacgccgtcgagcgcttccgcgttggcatggccgaacacatctacttcgttaacaattcgccgtatggctacccgctggaatacgaggggcactcacgacaggctcccgccgggatggtgaggatctcctgtatccagtttgaggaagcgttcgcggctgcaacagcagaggcacaaaaagcatgatcagcacttcacagatccagtccaagttcgacaagatcgccatgcagtggggcgtgaacagtaacgtggcactggtgtggcgtaacagcgccgacaacgatatgaacgagcaggcggtgagccagctggtgggattcccgcagcacatcccggcaccgtctatctccatgggcttccagcagtccgacttggcgcggcgcgggatctaccaggtgatgctgcgtgctcctcgcctgtcaggaacccgtcagatctacgacgctgccgacgcgttggtagaggcattcaatgaagcaatgttctacgacggaaattatgttagcatcggcgacgacgatcagcagctataccttaccgctccggccgaaatcggtgctgactatgaggacgacgccgggctgcatgtggctgtcacgatgaactaccgtatcaacaacgtaagaggctaacatggctacgaaactctcctacaacatcccgaacggctccacgctgcaaatcgcacagacaatgggcgcaagcgtagcagtgaccgggatcaccaacgcgaaagaggcggtagcgtctatttcagccgaggattcaagcatcgccgcaggcgactacgtgcagctgttcaccagttgggtcaatatgtccggtctggtggcccgcgtgaagacagtagcggctggcaaagtcacgctggagctggtggacacctccgacaccgacatttacccggaaggcggtggagctggtacgctggttaagattcaggcgtggatcgacctcccgctgaccccgaccatctccaactctggtaacgagcagcagaccaccacgttccaggctatccagcacgagcgcgcggtgaacatcaacacctacaagtcggcggctacgcagactttcaccatggcgcacgacgcaagtctgccggtgcgtgaggtgctgaaaaagctggatcgcactcaggacatcaccgcgttcaagttctacaacaagcgcgcgaaggaaacccgcgtttacggttgccaggtctcctttaacgagatcccggcctccgaggtgaacaacgtcgaaacgaacagcctcgttctgagcctggtcagtgagatggtgatctatcccgccgcgtaaagcgtgctatcatcagggcggcttcggccgcctttttcatatctggagacaatagacaatggctgcaaaattcaaactggtacccgccgggactttcgaacttccgatcctgatcaccaccgtagggcaggatgaccctaccgagctgaaatttactttcaagcgcatgccgctcactgagctgaaagagaagcaggacgcgatggcgaagcgcgtgcaggagatggatgaggagtacaagggcaaaaagctgtcctcagtcgaagatagcgtgctgcaatatccgttgatggctgactttgtgctggacatcgcaaccggctgggagctgtccgatgagttcacgaaagagaacctgatcaccctgttcgacaactacccgacggcgtttatgtcgatcagcctgggatatcagtccgagctgtggaaactgcgccaaaagcgctaaccgccgcgattgagggtctatatttccccgatccgccgcagcagttagtcgacaatttcgggggtgagctggaagactaccggccagaagtggagctatcagcggagatcgttgatagcttttatttttatcagcgtatagatacccaatggcgcacggggccgggcggtttaatcggcctcgactacaacgtgatcccgaccatggcgcagctttacgaggtgaagttcgaccgccaactcatggacgacctggctgtgatggaaggggccgcgatcagagttctcatgagcaggagtgatacagcatgagtgaaaacacagaacgcttgatcgtcgacgtcgacgccagcggggtcaacgcgggggccaagtccctcgccgaccttgttgacgcggcgcaggacgcaggcagggcagcggacgggctgggcgacaagttcgaccaggtgaagccgtcggccgactcagcagccgcagcggttgacggattcaacaacgaggtgaagcagacgcaggaggcggcaggcgacgctgctgtgggcctgtaccggcagaatcaggagctgcaaagcctgcttgaccgcatccggccaacgcgcgttcagcttcgtgacctggcgcagcagcaggaggcactggcgaaggcgcaggctaacgggctgctgggggcgaaggaggcggaagagtacaacgccatcctcaccagtcgagccgggatcatcgaccgcaacgacgcggccatgcgcgggctgaatgtgacgtcagagaaacagaagacgttgcagcagggattgaccatcactaccgggcaataccgcgctgcgatgggcatgttaccggcgcagatgaccgatatcgtcacccagctggcggggggacagaatcctttcctgatcatgatccagcagggcggccagattaaggactctttcggcgggctgggcaacacctttcaggcgcttaaacaattcatctccccgtcattccttgggctggttggtgcgactgcggccattgcggccatgggttatgccgcctataccagtgcagagcaggcagacaggctcgccgcatcggtgacgctcatgggtggcgctggctttaagtcggccgagcagatcaaccaggcggccgtgaggattcagcaggcaaccggcgacagcatcagcagcatcaccgaccgcctgatcgacctgaacaacaagggcggcctgacggctgacatgatggagaagatcgcgatctccacgtcaaaactgaccgatgccgggctggacgccagcgacgtgatgaaggacttcgacacgctggtgaagaacccgatcaagtccatcgccgcgctcaatgagcagtacggcttcatgaccgaagcgcagatgaagcacctcatccagacgcagaaggagaaaggtgagcaggccgcggcggccgaagcgctggacatctacacaacggccatgaacaagcgggccgatgacgtgatcgataagaccgacaacgttggacaggcatggaagacgctgaaaaccaccgcgtcggacatctttaacgatatggggatcgtgctgcgttcgtggggcaaccgcgccgtcgacatcttccagatggttaagctgtcaatcgacgacctgctgaactacctcgcgcagatggacagcaaattcacgctgggcgtcgctgacctgctggacaaggtgccgggcgttgatgggcgtggcgttctccgggcgatggggatcgacgtcgacaccgtcgagaagaatggccgtgagtccatcgagaagggcaagcagatcgcgaaggagttcgcggaggtcagtaagcgcgcctttgaaagccaggctgacgctgaggcccgcgctcgcaacgccaacggcgctaccggcagcggcgctaccgatgagaagagccgtgaagcggtcagcaagctggcgagtgagtcagcgaagcacaacaaggagaaggccgtcaccgttgcacagggtgatcgcatccttgagcagtatcaggcgcaggagctggcattgcgggcgcagatcaagacgttgaaagaccgcaacgccttcgacgtcaacgcctccgagcagatgaagaactatcagctgttagtcgcgaagatctccatcctggagggcatccgggctgacgccaaaggccgggcactcaccaaggacgaacagtcgcttctggcgagcaaagaggaagtgctggcgaaggccaagaccgtcggactgctgggcgatcaggtcaagcagctggagcgtcaggcgcagatcaccgacgaactgacccgcagcggaaatgacctttccgttcaggtggcggcaattaacgcatcatgggggctgtctgccgatgagtcggcgcgactgctggagaacatgcagcgagcggcggctctccgggacaaaggcgcgtctcaggagcagatcgacgaggacgcacgccagcgcgaagcactgcgacaggctaccgatgagaaaacgcaggactgggcaggcggcgcacgttcagcgatcgaggcttggggtaaggacgctaccaatgtgtcggccaacgtgcagaaggctgtcacgggtgctatggatgccgggctggactcgatcaacaccttcgtgatgaccggtaaggcgtcgttcgccgacttcaccaaatccatccttgggatgatggtgcagatgatcaacaaatggctcatgttcaaggccattcaggggatcggcggcgcattgggcttcgatatgtccagtcttggattcaacgcgaagggtggcgtgtacgacagtccgtcactgtcgtcgtacagcaaccgcgtctacaccacgccgcagctgttcacgtatgacaagccaaagccgttcgcgaagggcggggtgttcgccgaagcagggccggaagccatcatgccactggcgaaggactcaagcgggcgcctgggtgttcgtgctcagggtggcggcggtggcggcgtctccatcgggtcgatgtcggtgaacgtcgaccagaacgggcaggcgacagccaacgtctcagagtctggcaagctgggccgggcctacggcgatgcaatggccgcagccattcaggacggcattgcccgggcaagttccccgggcggacagatctggatgcttatgaacggtcacgcgtgataacctacagcctcccacacaggaggctttttttatggctacattagacgcgtggatctggccgctggcggcgggtcaacaggtatcagtgaaagaccgcagtaggtcaaacagcttcggcgacggctcacagcaaaacgttctggaaggcatcaacccgtttatcatggaggtgccctgctcgtggactggcaacgtgaagaccggcaaccagatcctgtccttcctgaaagcgcacatcaccaacccgttccagatggttccaccgcatggcgaactggggctttacaccgtgaagagcgggacgatcaagtatgtcgcactggggcgggcaaccatgaacatcaccttcacagctgagcaggctgtgggcatctacacaggggcgaaaggatgagcaacaccatttttgacgaagccactaagctcgacccatcaggcaagatcttcctcgtggagatcgacggcactgagttcggggcgggtattatccggggccactattgccagctcccgcacacgagcaaggagatcctcgacagtgcgaacagcacgctgacccgcgatcagctgttccagtgtttcagcagcaatgcccgcggcactctcacgaagaacgaagaccggaacaccatcaccttcaaatcgctaggggctgacgcgaacctgctgctgcctgcgtttaccggcggcctgacgggcgggaagtatcaggtgattgaggtggtaggacgctggattaccccgcctgctggctcggataacctgtatcagatctactataagacggcggcgcacgacttctcgccgggctacctcaagaccgggctgttaccggcggtcactgaggatcttggggatggctggctgaaattctcgttcgatatgtcgcagctgagcgcgggcggtaccgactgggtcgacagccagattatcggcattcgccttgacctatggcagcaggcagtcggcgagatcgagatcaagcgaatcagcatcctgaacaagaaccctcacgaggtcgacgcatccaagttggccccgaagtcaatctggttcgacaacgtcgaatatgggtactggcctttcatggccgaggggatcgagttcagcagcgagcagcagggaacgcctaccctgtccatcggcaaccagtctggcgtcgtcagcgcctacctgcgcgcctatcagcagatggttggggcaaaggttaagctcatccagacgtatgcgaagttcctcgacccgcgcaacttcaccgacggtaacgagtacgccgactcaatgcagcagtggacgcagctctactacatcgaccggccggactatgagagtgaagagtatgttcgcttcgcgctgtcgtcgccgctcgatctccagaacttccaggtaccaacgcgcagcatcacgacgttctgtcagtggcaggctcgcgggctgtacggcaaagggctggacgcaggggaagagaacggatgcagctggaaccgtggcacggccaagaagtggtacgacaagcacgggaacgaggtggacgacatcaccaaggacgaatgcggtggatgcatccaggactgtcgccttcgcttcggccagctggtgagtgacccgaaagcggctgttctggactatggcggattcatttccgtgcgtctgattgactaaaacgcgctgtaacgcgttctgaggcgctttctatggcgagacgtccgaacgtatggcctaacggcgttaaacgcgacagcgtgccgtttaggcccgtagttttcgacttccgaagataagaatacatccccatagccatatataataaaaaccctcccaagggagttttatttatatggtcttggggtatgtcttatatgtatttatggtaataaatatatataccaataccacctgtcccctgaaattcagcctttaaaatcaatggcttaaaagttcaggggaacccaaggggagccaaaaatgattgacgtaaaagatatcccggaaaagcaattaacgtatattaaacaacaccttaccgagtgttcccctcaagagggctgtgggctgctggtggattcagggggaggcttcgaatactggccggtcatcaactccgcagccgacaaaatgaatagcttccgcattgctccgcaggactacgctgaggctgaggacgcagggaacgttgtggctgtcatccattcgcatcctggtgctgacggtctggcgtatccgtccatcctcgatcgccagctcatgcaggagacgtgcttgccgtggttcatctacgccccggacaaggatgagatggcggtattctttgaggagccgaagggtctgctggggcgtgacttcgtgctgggcgctaccgactgctacggtctggtgatggcatggcaccgttcgcgcggcatccagttgccggacttccgcaagccgtacccgtggtgggagaaaggtgaacagctgttcacggatgagaattttgcagcagctggctttgtcaagaaaaccaaggctgagccgggcgacatggtggtgttccgcatcgccgccagcgtgagcaatcactgtgggatctacaccggcgacgggatgatcatgcaccacctcatgaatcgtaagtcgaccatcgacaggatgtacggcacttaccttgagccgcgcattactggtattctccggcatgagttactaccggagaaaacaccatgggaaaccagctaagcaccatccgactatacggtgaaatgggcgcgcgcttcgggcgtgtccatcacctcgcagtcgactcctgcgccgaagcaatcagcgccctttccgccattctccccggcttcgaccagtatatgcgtgacagccagtcgcgcggcctgaccttcgccccgttcatcggcaagcggaacattggctttaacgagatgtcgcagcctatccctgacggcgaagagttccgcatcgctccgatcatcatcggcaacaagaagggcggcctgttccagaccatcctcggtgctgcgatgattgttgccggtgtcgtggcgtcgttcatccccggcgggcaggctgtctccccttacctcgttgctgccggtatctcaacggccgctggcggcgtcatgcagatgctttcccctcagtcgaccgggatgaagatccgcgaggacgacgctaacgccccgtcatatgccttcggtcagccggtcaacacgacagcacaaggtaatatcgttggcgttttgtatggcgagcgtgagatcgggggtgctatcatcagcgccggaattatcgctaacgaggtacgttcttaatggaaatcaaaggatacaagggcgggagtagcaacgtgcatactcccgttgaagatccggactccctgatcagcaacgcaacagtgaggatgctgcttgcgctgtcagagggtgaaaccgtgccgattagcgcggaagacctgccgaagcgtgtctatctggacggtacgccagttcagaacgatgacgggtcagttaacattccgggcgttactctggagtatcgcaacggcaccccgcagcaggagccgatcaacggcttcccggcagtggaaagcgagacgcgcattaacgtggagctgaaaaagtcggctgcatgggtgcgcaacatcaccaacaccgagatcgacgctgtccgcatccgtatgaacttccgactggtcatccagcagaaggacggggatcgcgttggcggccgcattgattacaagatcgagtaccgcaaagtcggcgacagcgcctacaccactgcattcgacggcgcggtagacggtaagcagaaagacaactacgagcgcgatcaccgcatcgacctgccgaagagcagcaccggctggcaaatccgcgtgacccgcctcaccgacgacagcacgtcagacaccaccgttctcaactccgggatcgtggctgtcaccgagatcgttgacgcccgcgttcgttatccgtggacgtccctgctgttcgtgagcttcgacgccaaatccttccagaacattccgaagatcagcatcaagatgggcggccggctggttctggttccggccaactatgacccggtgaaccacacctacagcggttcatgggacgggacattcaaacaggcctggacggataacccggcgtggatcgtctacgacatcgtcctgcacaagcgcttcggcattggccgccgtatcccggcctcattcctgaacaagtggacgatgtacagcatcgcgcaacgctgtgatgagctggtgacgaatgccgacggcacgcagaaccgccgctacacctgtaacgtgtacatccagaaacgcgcgcatgcgtggagcgtcatccgtgacctggcgtcgatctttaacggcatggtcagctacagcaacatgcaattgcagtttgcgcaggacgcaccggcagaagtccgtcacgttgtgacgaacgacgacgtggtgaacggtaccttcgaatactcatacggcagcatggctaaccgtcgcggcatcgctatggtgacgtttgacgacccgaaggcgcactacaagacgcagaccaccgtggcgcagttcaaagacctcgtggagcgttatggcgtcgagccgctggaagtgtccggcatcggctgcaccgacgaatacgaggcgcaacgacgcggcctgtgggcgctgctgtcgaacatcaacgatatgcagatcagctaccgcgtcggcctgaacggcatcaagtacctgatcggcgacgtcgtcggcatcgcgaaccgctacgtgcagggcggtcagttcggcggccgtgtggctggcgtatccggtaccaccatcacctcagaccgcatgatctccgatcacgtggcaatcggcgaccgtgtgattgtccggcaggctggctccgacggcacctacaaccgcgtgatcaacgcaatcgcggctgaccggatgtccttcaccgtcgacggaacagaccttgatattcagacaggagaagtcttcctgctggatactcaggagctggcacctgaacttatccgcatcaccaagatcacctacaacgagcaggacaacaatttcaccgtcaccggtctgcaatacagccactcgaagtatttgcaggtagacaccggcgcgcgaattgaagaccgtccgacctcgctgatcccgaccgggcaggtaccggcaccgactaacgtggtggccgaaggctatagcatcgtcaaccaggggctgcgctccgccaacgtaaactgctcgtggttcaccgtcgatcaggctgtcagctacgacattcaggtgcgccgaacctctcagtcaaacggccagtggtcacagggctggactaacctcgccagccagtcgaacacgtccgtagacctgaccaacgttctgaccggcacctatcagttccgtgttcgttccgtgtcccgtgacggcggttcgtctcagtgggtcgagtcgaatcaggtgttcgttgacggcaagcgcggcagcatcccggcagtagcgggcctgaacggcgtcggcatcgtgaacggaatcacctggcgctgggtcactggtacagacgacctcgttgacatgaagtctaccgagctacagttccagcgcatcgacagcaatggcgcgccggtaggcaactggatcgacctcagcgttgtgacctaccccaccggcacgttcacgcaatcaggcctgaaattcgctgaacgcgttcgggtacgcgcccgcttcgtgtcgtcatatagcgacgctggcgaatggagcgcgccagtcatggcgatgacgtccgacaacatggacgactattaccagaacatcgacgacgcgattaaaggctccgatacctacggcgagctgaccgacggcatcaaggaagtcagcgacagcgcacaggcagcgaaagatgcagctcaggccgcacaggtcactgccgacggcgcggtagccaccaaccagcagcagcagcagcagctgaacaaccagctggctgagatccagaagaacgcgcaggacatcaccaacaccgccaacgccggggcggcgaacgccagcgcaatcgctcaggagatcctcgaccgcaaggctggtgacatcgcgaacgccaacaaggcagcgcaggacgtcgccgacgctatcgcgaaggctgagacggacgacgcagaggtagctgctcaggcggcggccaatctgctgtcgactaaaaacgacgtcgaagcgaagatcgatacgacgaacatcaccatgcaggacggcttcgacagcctgtcccagcagatggcgtccatcgcagctggtaccggcgagcagttcgacagcatcaagatctggtacttcgacaacggcccagaaggttgggcatcggacgacagcaacaccaacctcctccctgtcgatcaggacggctggatctacccggctggcgcaacttcaaccatgcgctcacctaacccgctggcaatcgacgcgcgcagctacaaatacatgcgcctgcgcatgaagaaagttggtagcccaatctggaagggtaagctgtactggatcggtgcagatgagacaggctggaatgatgcccgctccttcaccatccccgaacccgagttcgacccggccaccggcgtcaccgtgctgtcgctgcctgatctgctgtgggcaacatccggcacgctgcgccgcctgcgtctggacttctccagcaatcagaacgccgataactattacgccatcgactggctggccgtaggccgtcctaccccgggcgcatcgcaggcgcagatccaggacttgcgcacggcaatgaccgccgccgactccgccgaagcagcagcgcgtaacacgctggccgtacagcttcgcgggaactacgagggaaccgacccggcacagctggtgactggcatcatctacaacgagcgccagacccgcgtcaccgcagagcaggcgatctccagcgacgtcaacaccctgcgcactgactacaacgcgaacaaggccgccgtgacccagcgtctcgacaccctgaccagcgaaaaccagtctcaggcgcaggcactcacccagctgcaaactgacctgaccaacgccaacgggaagatcgttgctaactccacggccatcacccagctcaagacggacgtgaccaacctcgacgggcgcgtgacggcgaacagccagctgatcaccggccttgagagcacgctgaacagcgacgctatcgcgctggccgccaacccgaacaacctgctgacgaacaccggcttcgaacgcaaaaaggatgcgtggacaggcttcaacacctactccgacatctacgcggctcaggtgcccaagtctggaaccatgatcctgcgcgggaaggctggcggcatcgcctctatcggtcagaacgtcgcgaacatcaagcagggccgaacctaccgctatggcggttgggtcaagcgctcctctgatatggcgatgagtccgaacaccaccgggaacaacaagttccggttaggcaacgctgacactggcaccggcccactgtccgaactcctgtacaacgccaccaccatcggcactaactggacgctgttcaccaaggacttcacggcatccagcgatatgacgatttactatagcgtcaactggattctgaccgccggggaaatctacttcgacgacgtcttcttcatcgacgtgaccgaggagatcaggaataacgccaacgccaccgctatcaccggccttactacccgggtaacggccgcagagggcgcgatcaccaccaacagccaggcaatcacccagctgaaaggcgacgtgagcaccctgcaaggtcagatggcgaccaaggcagaagcgagcgcattgcagcagctggcgaccaccgttagccagcagggaaacacactgacctctcagggtcaggcgatcaccgatttgcagaacaccgcgcagaacggcaaggcgaagtactggctgaccaaggtcttcgacatcaaggtgagcggtagcgggtacatcccgacactgtccgacctgtctggcgttccgccgctggccgtgtccgagatggccgatgctgcacgtctggacttcctgacttacggcgactacaaaatcgcgtatgcgaagtcgctggtgtatgtcgcagctgacaagaccattgcaatctccccgggcggccgcatcgtcgacgacactggccgtctgtacatcaacggggtagaggtagccaccttcggcgctggcaccgcaacttacagcctggcgctcaaaaagggctggaacacgctggagttcgtggttgcgcagatcaccggccagttctacatcaacttcggcctcaagctatctgacaacgtcgatcagctgttcagtggtgccggtcagctggccgccgcatccgcctcgcagatcctctcctctcaggttgagcagaccgccgggaaggttgacgcgaacagcgccgcgattgtcacgctgaacaactcagtgcaggacatcaacaccgcgctgaacaacaaggctgacgcgagcgcgttgcagtcccttaccacccgtgtcaccaccgcggaagggaagatcactgcgcagggtaatgccattacccagctcaccagcgacctgtcgacggccaacggaaagatcaccgctaactcaacggcaatcaacaacctgacgacccgcgtcactgcggcagaagggaagattgactcgcaggctgaggccatcacgacgatcaactcatcgatcaaaggcgtgctgactcaggcggcgaacctcatccctaaccctacggtagacccggcctatccgcaaatggggcttaccgtcgtgtcgaccgcaggcgaaggtgtcccgaccggatgcccttacccgtgggcgatcaagtgccagtaccgcgatcatgttccggcaatgaataacatcccttgccgcgaaggacaggtgttcgaattctcaatcctggctgcatgtggcaccggcaccgcaccgttccagcactacatcggtacgtcgacgctggtttctggcagcatcggttccccgcaggctaacggcggccagatctccgccgctaccggcgcacagtggacgcgaaccacatggcgctggactgtcaacgcagcgcagggtgcacggggttatttccgtccgttcctgcaaatcgggcagagcggcccggacttcggaactatctggtatgccactgactggagcgttcgcgacgttaccgcagcagcgaaggccgaaggcaaggctgacgccaacgccacggccatcacccagctgaccacccgcgtcacctctgcggaagggtcaatcacgtctcagggccaggccatcaccaagctgaccagcgatttgagcacgcttaccggcgtagtgaacagcaaagcagacgcttcggcgctgaacgcgctcaccacccgcgtgtcgaccgctgagggcaagattgattctcagggaacggcgatcacccagctcaataacagcctttccgcgaccgacgcctcaatcgacgcgcagggcaagatcccggggaacctgctggcgaacgcctcgtttgagcgtggcacggtatcgttcagcggctggaactccctctccactgtcgtcacgctgagcattccgcacagcggcaccaaggcgctcaaggcagcaagcggcggtaacactggcgtcggccagaacgtggagatcacgcagggccgtcggtaccgcttcggtgtgtttgccaagcaggacacaggcacaaccatcagcgacccgggcaacacgaagttccgtatctctgactctaccggcctactggtgggcacgaacttcggcccgttcacggctgactggcaacacgtcttcatggactggacagccacgaagaccaccaccgcgctgttccagctgactaccgcgctgagtgccggggcgatgtacttcgacgacgtctacgtggtcgacatcaccaacgacaccaagatccaggcgaacgctgacgcgatcaccacgctgaacacgaaagtgacccagcaggggaacgacatcacgtcgcagggcagcgcaatcacccagcttaccaaccgtgtgctcactcagcagtacgcgaacagcaacccgtgggtagatggctcgtttgagtcctacgcgaaccagcaagccatcggcggtgcaaatggcctggtgactactgagttctttttcagtggcgagaagtccctcatgtgccgccgtggcaacggtgaaaccgggaactctgataagacgtttggctatgaaacggccattcgtgagtcggcggtttaccgcttcgaatgctgggcgatgatgccggaagatgagacgccgccggaaggatggggctgctacgtcggtatcatggttcgcaccgcagccggacaggcagcatggcctaccgcgttcaacatcaacgaagccgcgctggctgctggtggcggtcgtgggaagtgggtcaagttctccggcaagatcggtgctggtggagcgcagaagactcgcggtcgtctgtggatctcctgccgtggcacatccggcggccctgggtatcgtgtgttcatcgacgacctggtgattaccgacgtcaccgacgcgcacgcagcacagaccactgccgatgctaactccagcgccatcaactcgctgaccagccgcgtgagcgcagctgagggcaagatcacctctcaggccgacgcgatcaccaagctgaacggcgacgtgagcaccatcaacggcacgctgagccagaaagccgacgccagcgcagtcaccgcactgcaaacgcgcgtgaccgcagcggaaggccagatcacgagtcagggtacggccatcaccaacctgaacaacggtctggaagcacagcgccgcactggtgaaaacctcgtgcagaacttcgacttcctgcaagctggcactgcctttaacgtacagcaggacagcgtaagcaccgtgaccttcggcgcgtatggcgacggtaaagcaggcgttcgtatggttcgcgctaacggcacatctccgggactgttcgcgaacaacaaaaagccggtaccgcagaacggccagcgccgctaccgctatgtcgtccgcgcgaagggtgtgagcggggcaatgaacctcctcatgcgtcgctggaattacaacggctcggtagaaggctcttacgctgacaagaacaacacgctgacaaccgactggcagaccctgacctgggaaaccgatctcaatcaggcaagcggcgttgatggcgcggcgttcggtctgtattgccacccgtcaaacgctgaggtgtggatcgactcgttcaaggtgtacgacatcaccgaagagctgacgatcaaggcgaacagcgcggcaatcagcagcctgaccaccaccgtcgaccagcacggccaggacatcaccgcacagtcgaacgcgctcacacaactgaaatccagcctgactaatgacgcggtagcactggcggcgaacccggataacatgctgacgaacaccggcttcgagcgtggtcaggacaactggggcggctggagcgctcgcgcggatgtctatgccgcacaggctccgaaatccggtgcaatgatcctgcgtggtaaggctggcggtaacacggcgatcactcagaacgcactgggcgcgaaagctggccgtacataccgcttcggtggttgggctaagcgcacagccgatatggcgatcggtgccaacaccaccggcaacaacaaattccgcctgggtaacgcgaccaccggcgctggcccgctgtctgagctgaacttctcagaagcgaacatcggcaccaactggacgctgctcacgagggactttgttccggcgacggatatggatgttgcttactccatcaactggaaccttgctaccggcgagatctatttcgacgacgttttctttatcgacgtcaccgacgagatcaacaacgcagcgaacgcgacggccatcaccaacctgaccacccgcgtcacgacggcagaaggcaaaatcacgtcgcagggtacggcgatcactcagctgaccgcagacctcagcaccgcgaacgggaagatcacggcgaacgccaacgcgatcaccagcctgcaaacgacagtgaccaatcagggcaatacgctgacctctcaggggcaggcgattaccaagctgaatagcgacctgtccgacctgtctggcgtggtggacacgaaggccagcgcttcggcgcttaacgccctgaccactcgcgtcacgaacgcggaaggcaagatcaccgccaacacgacggcgctaaccagcctgacctctcgcgtcggtgatgcagagtccgcgatcgacggcctgaacgagacgactgcggctaacggcctggcgatggctaacggcttccagcagctgcgcgcacagattggcgacaatcaggcggccatcacgcagacgaacaaggcggtggtagatctggagtcggcaacggcgcagcagatcgacaccatcaacgcatcaatggatggcatgagcgctaccgtgcagcagacctcaacggcggttgcggatatcaacggcaagctgtcggctcagtggggcgttaaagtccagaccgataccggcggcggcaacccgcgcattgctgggattcagctgggcatcgacgcaaccggcagctcgcagttcctggtgcaggctgacaccttcgcggtgtacgctggcggggctaacaagacgttcccgttcgtggtacagaacggcgtggcgtacatgcaggaagcgttaatccgtgacggctcaatcaccaacgcgaagatcggtaacgaaatccgctcgaatgactttgttgatggctcgcagggctggcgaatcgccaaggatggatcgtcccagttcaataacgtaatcgttcgcggcagggtggaagcgaatagcggttctttcaaaggtaccctgcaagcggaagcgttcatcggtgatattgcagtggcgcgtcgctacgatgatatgtcgttccgtcgcaaccagaccgtgcagcgcaacggggcttatcagaaccgtggctacggtatgaccgtagttctgtcgtgcacgctggtttatcagctcactggtgccggtaacgttcagcagtcgtattctgtcgacatcacgtttaacatcggcgggcaggaagtcacgcgccgcttcttcgcgaacgcatccggcttccaggctggcgacttcacacaggagtttcgcttcgctgccgaccttgccgccgataacaacaatgtgaccttcttcatcaaggctcgcggcaacgatgcatcgatcgattacaactgctcgatccagaacatcacggctaccgctttccgcacgaacagcaactcattcagctaatggaggcggcccctacgggggccgatattgaatggcaacaattagcgaccaactcgcgaccgatattcacaacgcgttcagcaagtactacacagacctcgccaatcaggatcagatcttcttcggtgtcggcgacgtgcagatcaccaagcaggacggcaccaccgcaaccgtgcgctcatggaacaaggtgatcggctcggttgacaccgcggcgcagcgaggctccaccaacaccttcacagccctgcaaacgttcagtgctgggttaaacgtcaccgtgaacaacatcaattgcagcggcgacaacagtatgatctacctgggcaagaactcagatcttgcgctgctgaaaaagcagggacagggcgggacggttgccgtaggcagcgggacgccgttcaaagtccagcgggccaacactgcaacagtctcacccacttcgacctatgaggacatcttcgttattggcgtggacaagcagacgacgctacccggtgcgttggctgctggcggcaacatcgacaacacgtcgaagggtaaggtgctcacccaggccattgagctgtcaatgagcacgccttacatcgacttccactacaacggcagcagcgcggactttaccgcccgactcatccaggacaggtcgaaccggctgaacgcgcaggtggcgagcttttgggtgactgacggcaggatcacggcgtcggcatcaatgccagctaacccggcggcgggaacgctgctgaccgctccacctatccgatcattgatgaccgggcgcggggcatacggcgacacggacggcgcttacgcacaaatgtacctggaagagcaggtcggcactgagcaccggctcgttctgtacgcggacggcttcgggcgaacagatgcatggatcttccgtgctggcggcacgatctccaccgggaagggtgacgtcctgacgagcggctcagatgtccggctgaaagaggacttcacagaagcgcctacaagcgcctgtgagcgcatcgagcgcttaggggtatgtcagtaccggatgaaaggagaaagtcgcgtgaggcgtggttttatcgcgcagcaggcagagactgtcgacacggtctacacgtatcagggagaggagcaggacatcgacggagagaagttccgggtgatgaacgtggactatgtggcgatcattgctgacctggtggcgtcggtgcaggagcttcggaaggaattgaaggagctgaaaggggaataaaaaaggggccgatggccccttcttgttatgcgcagcgtaccttgacgccgttaacccggttcagcgccggattgtagcagctgacgctgtcaccgacggcgatcacccggcccttcgaccactcagcgcgctctttgcccgcggtagtgttctcgtaaaccttcgtctggttctcaatctggctgacgccctgattgcttttatcagcacgctcagcagagaacgcggaggtggcgacgaaggacagaacgagtccgatcagtaaagccagtaatgcctgtttgatgttgatagtcatggttattccccttctactttcacgagttcatgccatttgaggcctaaaggcttcgccaggcggatcatggtttcaatggacggaaattcgcggccattgtcataacggcatacgcggcactgcgcaatgcctgctgctttcgccagaccacgctgggaaaacccagcgcgctcacggtgctctttcaaaatcagtgtaatggtcatcttctacctcaaaacggaatgtcgtcgtcaaagtccatcggcggctcgctggactgctgctgtggttttgactgctggcgcgctggccctgactgcgtgcgcggctggccctgcggctgaccttgctgaccgccttctgccttgccgcccaacatttgcatgatggcgttcggcccgttcagcaccacttcggtcgtccacttctccacgccgttgctgtcagtccacttgcgtgtttgcagcttaccttcaacgtagatctgtgaacccttcttcacgtactcgccgacgatctccgccagcttgccgaagacaacgacgcgatgccactcagtttgctccttcacttcgccggtctgcttatcgcgccatgactccgacgttgcgatggtgaggttagccactgcgccgcccgaaggcatgtagcgaatctctggatcttgaccgacgcgacccacgaggatcaccttgttaattccacggcttgccatttatagcgctccttaaaaatcttcttcaacgtctggttgctgaggcgctacatcttgaggctgttctgtttccggtgcaacctggactgtcgccttcccgcgtttagcgttggctggcttgccgggattgaacggacgggcttccgcgtttttcagctcgacgatcttactggcgcgggcgtcatcgacgatgcggagggatgccttgtcgctgcggaacagctcgcatgcggcgcggtagatggcgtcgacttcgtccttatccttcgccgcctcaatggagcggcggcagtcggctgcgctgcggactgacttgttgccgtcgtcgtcatccatggtgaggccgaagatagcgacccgggcataacggcgggcataggtcagcgttgagccgaagccctgagcgtcgttcttcgccagcgggatctggcagatgtcggacagccattcgccagtggcgacgtggataattcgcgtctccatcagcatcacgttcggagcctgtcccgcttcgtgggtaggcgactggatcatgattagtccggcgtcttccattgccgggccgatggccgccgcaacgtcggtaagggtcgagtagtggttctttaagtgctggttctgcttcgacttcttcggcgatacgcacatatcctgcgcgtgggcaaactgcttgacgatggtgctgcatggctgggaaaacttcatcattttgtgactccttatgttgaggggctaatatggcagcatattagccgtgaatcaattactttttggtcttgccgtcttcccataggtggcggaaggtgttttccaggtagtacggcgggtcgaggtcaatcacgttgccaccgccgtaggtcggccatgtgttattgtcccggcaccacttgaacgtggcgatggcttcacgcagctgagcgtagccgatcatcagcgtcttggtggtcatggcgaacggggcgacgacgaacgggctgttcttctcctgcgccagcagcatcgtgcgcaacggcttctggccgaatgcagccttaaacccttcacgctgcaacgccattttgagcgggtacccgaggtcgaaacacttcctcatgaaccgttcaggattggccgtgtccgtggttttgtagtcgacaagatcgccgttcttgctgatccagtcgaggcgcaccttgcaacgcaatccctgatagctgaaaaagatcgagacttccgacataccgccgacgaaatattccttaaacgagtcgttattaaataacacagcgcgcatttcctgaatgatgtcataatcctgcccgcgaatgccttcgcgatcgccgcgctcttcattggccttcttcacaatatcgtgccagaaaaccacgtcgtttattcccagcgctgcggcggtgttggtgacggtttcaattaattccgcctccttcatcttcgaatatccggcaacgccgtgctctttaaggaatgccttcgcggcctcaagcgaggtaataaagttcggctgcggaataatctcgcctttatcgtcgcgcttaataaagtcctctttttccggcatgcggaaatattcacgggcaaataattccggttcgaggtggttggcgtgtgccgccgtaccgaagaccagcgcgcgtgcctgcttcttcttctcttcggcgaatttccagtttgccgggcagctggagaacagctcccacaagcccgagccgttcatgtggtctgtctcagcgtgatagtcttcgttcgacaggtcgttattagtgaagaaaagcacttcatcatctttgagcgatttaatttctgacattacatgatccccttattcatatccatgcgaagttttcgtgctaaatcttcctgcttaacgaacttgcggctgtcgcctttatagttgacccgtatcagccatttatttttgtgctcaattgccgggtatggcatgtgagatacgcggaaaataatgtcacctaacattatttcctggtcagtgctaactccgcagaaaacaagcgaccatgcggcgttttcaaccgatgtattcacgttgcatttgtctttaactggaacgcggagaacggcgcgctttaatgcacgcataaagccataggcctctttgaacgtcttgcggtctacgttgcgaattccggcgtgcaatattctggataactctgcatgtgtcatgatgacctcctgtgtggtgttcgggcatattacttccgcataatatgccctgtcaagtctatttaactgagatggtcgacgggccgaggaagtcgatcaccgcctgctttgcgcagtggaacccatacgccaccgcagcgaatccgccctgggctgacacggctgacaggcattcgacctgctccttgctgaccggcgtcgacagctttttggtttcccgcttcatctcgatcacgccgaacggctccccgttgcgaccgcgatgcaggatcacgacgtctgcaacgcccttgcggagtcccttcgcttgctggcgcaggaagtactgcttcccggcctttccgccgttctcgttcggcacgtggaaccagtacacatctggataccaatggttaaaccaggtggtgaagttaatcaggtggtcatcctcaagcgccttcgtcggctctgctggtggattgatgtattctttaatcacaggtcttcccctccttcgaaaatcttacgggctatcacgtcgcgggacttattcccgcctatgcgccggtgcgtcacgcgcttcggtgctgcaatcaggtgagcggacggcaggatcttcgtcttcaccccgcgccgcatcttgccccgggtgttcggtgatgcaatgtgcttatcaagcgctgctttccactgctgttttgctggcatgctgtcgctgtccggccagaagacctcataagccacgaagtcaggctccccttcattccccagcacgtagcggaacaccacgccgttcccgcacttggtcggctccacgttgaacgaacggacatcaacgaagtcatcgcgggtgtagctcttcttctcaaggctccggttggggtcaatcagcgtgttaccgcagtgggaacactgccgggcggtgatgtcgttctccgccccgcagccgcgactgaccaccaccccgcggtcgtttttgaagtccacgcactcgcgcgaaacgaaccagtactggcagcgttcgtccttcttgtaccgcgtgccgtcaatctctatcccgtcgtggtcgtacacgtggcgacaccggcgcgcgtgcttgccgttcgtgtgaccatacgggcactccttgatctgtccgctgctggtgtcagtctcatagcgatactgttcaaggaatggcgagaagtacagctccgccaggtcgtccagcgctccaccgtagtcgagaacgaggttgtcttccttgatcatccccagctcctcgacgtggaactttttgaggatgcgcatgccgcgcccgatgagctgaaccagtagcgtgaggctcccgatcttacgcaggataacgatggtatcccatggcggaacgttgtagccggtggtgaggcacccgatctggaatatgaacttacagcggttgttaaatgcgtcctccagtatccgatcgcgctccttctgcggggtgtcgtcggtaatgatcccgtaggtcacgcccgggggtagcgcgctggccgcctccttacagtgcttcttaccggcgcaggtgacgagcacgcagttgcgggatgcggtacgcttcacgacgtcgaacatgatgttctgcgtgatggttccctgggcaaggatctgcttctccatctcgatcaggtcggcgtcgctgaattcgtcgtcgccatcctccccgcggctcacgaaggaatcaagctggtaggtcagctcatcatcgatcgccccgtagtgggtcggcaccaccgcgccaacctcgaccaggtactcagttgagatgtcacacaccgccttacgccagaagccgggtgtttccgtgttctcgttgatgatcggctgcgtgccgcggtagtcggtgccggtgtacccgatgacgaccagatcgcgcccgtgcatctcacggcatcggcgctgcatctcccggatgataagcgtgtacccggtacggccagcggcgatcatatccgccagcgtgcgttcggccattcgctgcaacttctcgttctcggggtgcttatccgccagctcgcacgtcatctggctttcaacgatgtcgtcgacgttgacgtgctggcattcgtctatcagcaggaagcgcggcacgaagttagccagctgcttttcaagggcgttgacgaccgttttctcgctaccgcagatgatcgggaaggtggtggacttcatgcgcaggccagcgctgaatacgctgttttccaccccgaagttccgtatctccatggcgttttgcttgatgatcccgccctgacgtgacagcacgagcgcgggcttattgagctgggtaaggcggcgggctaccaggctgatcagcgtggtcttccctgccgatacggctgctttgacgacgaacgggccgatctctttgtagtggttgatggcctgcgacgtcgcgaagtgtgccgcgaactggaacgggtaagggtcgtatggcatgccgcgaaggcctttcagcagctggccgcgaacagcctctatgtccgtctcctcgatcatttgtttaatgcttttcaccttttccattgtcgcctcgttgacgtggtaaacattgcgttatattctgcacaacgaataccaaaacacaaggacttttgaaaatgatgaatatcggcaatatgcggctgtggatgcggccatgaagttctatcccattgagcagatagagcggctcatggtcggccgctgggagctgctcctctcccagtactgggacaagcgcgcatttaacggcaggcatcaggcctgcccgctgtgcggagggaacgatcggttccgctggggtgagtcgaagcaagacgtcacgatgaagggccgcggtgctgcaatttgcaaccagtgcggctcacacctgggcctgtggtggttcatggagactaccggctatgagttcccggtggcgctgcatgagattggggccaacttcctcaaggtcgagcctgaccaggaaatgacatccgagccagtgatagcccgcgaggcattcccgaaggctccgcgcatacggatggaggagaagaacatttcagccgcgcagaagtacatccgcaagcagcaggccgcgcctgactatgaccgccggttttggatggcctacgacctgatcgagacaatgcgcaaatatcacatgtgaaatacagttgacaggcatataacgcataagtaatatgcccgaacacccaacagaaggagatgcaaaatgtcagaacaaaccaccgtatcaccgaagaccgccagcgcagtagccgaggaaattaagaaggctgtcggccgcggccgcatcccggtaattgtcgcagaccagccagccatcgcgttcatgatcgtcaaagagtccagcaaggccaactttactgacgataagcagctgggggttaatgccggattcaccgagaaggacgtggtgaaccagatcgctaacgccacgctgttccgcaagtcctaccaccgagttcagcacgcggtaatcatcaagtcgagcaaggctgcggccgctggcaacttcgacggccggtacttcgtgaagatcatgtgcaaccgcctgtatgtcacaatgggcagtctggctaactatctggcgggggcgaaataatgatcacattagcgcgcaaggacatgaagtcagggatgatcgttcgctccctcaaaagcggcaagttcatgatcgtcggcaaagggaaaaacggcagagtcgtgctgcacatgcatgactttaagccgattagcccggcacatgatgagtgggagcttgtgggggtcaatgcaaaactaaacatggggtggccatggctatcggctgtcggaaaatgatcaagggcagcgagcgcgggaagatggtcggctgcgggacgtacttccacgcaggcggccgtcacggacgctggcacgtgatcgataatgtcgtagtgtgtaaacgttgtttcaaacagtggaaaaaggagcacaaagatgaagaaggcgatattcctgtttaaccgctctcggcacatgttgcagccgtggttagacgctggctatgagtgctggacgttcgacggccagctgaaagagggcgttcacaacccggagccgggcctgttcgaagtgggcatgtggttcgacgcctcagttaccaccgtgcatgccaacgacgtagcccggattgtaggcggtggcgtgaagttcatcgcctccttcgcggagtgcacctacctgaccaccaccggatcgcgctggctgtatcacccggatgaccgggatcttccggttgaggagcgacgcccgcacccggcatacccgaaccgccgccgtgatatgaacgacgctgttaagctggcgaaattcgttgcgctggtggaggcatattgccacatcgtcaacgggttttcctccggccctatcccgtggatgctggagaacccggcgcggtctttcctgccgaagttgtggcgcaagttcgaccacaccttcaacccgtgcgattacggcgggtacatccccgagggtgaggagatgcacccggactacccggggatcatccctgaccgtgacgcctacaccaagctgaccgccatctggtgcagcgaggcgttcgtgatgcccgagccgaagccggtagcgccggtgggcaaggacttcaaccgggcgatcaaggtcggcggcaagagcacccgcaccaagaacatccgcagcgccactcctcgcggcttcgcgctggctgtgttcgaggcgaaccaccatgcataagttcatcatgacgctggaagattaccggatgttcgccctgcgtgaggagcatcgcatcatctcggttgaagaggctccgcttggtgatgcctgtatctcatgcgagggccgactggatattcatgtggaggtgatcttctgtcgtgaatggatgttgggcgggcagcggttttatgtgagcaaaatcaaatatcggtcaaacaccccaaaggaaacgaaatgaaagacgaagcagacaaatttacgatcgacgcatgggaaaaggcgcagcaatttggcggcgaacacaacccggcgctgcacgctgaggccgcagccaaaggcctgacgccatggcagctggtcagtaaccgcgtttgggcgacgaaggggctggtgactggcgggcactatcaggccgttctcccgcagaaagtaaccggccgccggttcaacgggagcaagaccccggacaacgtccgcccgaactggcgcacgccggagcacatcttcgcgtggctggatatgacctatggcccgttcgaggtagacctcgcggcctgcgagaagtcgacgaaatgcgacttctacttctgcaaagaggagaacagcctcgcgcaggactggagccaattcgatgcgatgtttctgaacccgccttatgacgacatcacgccgtggactgagaaaagccgggagatcaagccgggcgcagtgctggcggtagtgctgccgaacgacaacagcacggtgtggttccgcaacatggttgatcaggcacacaccatcatcaacatcgtcagcaacgggaagaactccggcaggctgtcattcgaacacgctggcaccgggaagccaggcaagcagaacaacaaaggcactgtgcttttcatcctgcgcgggcggaagcgtcgcggcggtgtggagacgctctacattgatcaggatcagatgttgcgcgaactggggttactggatgcacagtaaggcgcaagtctggcaggccgcgaaggagtgcggcctcgacgaattcattaccgccgtgtcaaaggcgtttcccggcgcgattgatggggtggcgatatcggcgaaagggataggcgttctggcaactgacgaccgcatgctgaggcgactggtgagggtgaagcccggcgtcacgctcacaaagcagcaagtcaaggagataaggacgaaatctggtgttactatgcgatataaaggggaaaactgaggagtagcaccaatgggtaagacgtaccagcggcacaaggccaggactgtttcacgggctgacaggctgcgcaggatgaaccaagataagaacacgcgaatcatcaccaaatacatcgccgggacactcgcccggctaccggaaggagaggatcatgactttagcgcaagcaattttgaaggcagcaatcgaagggcgcgatcttaagatcgggaagggcgtcgaccgcgagaataagcacattggcccgcgaaatggcaagttctggactgaggcgcgaatccaagaggtgatggacgacgtcactgtgcgccggatgacgaaggcgcagatcatggagaagcacaatatcactgagagcggcttttacaacgcctgctaccgttttgggattccgaccgcaaaatgaaaaaacataccgttattcaaatcgacactgctgaatttcataacgccgtctacatccttgggcgtgaagataagatctacaactggaaccagaacgtagagttccgcaagcgccttgttggcctactgggggaaattgcagcagcgaagcacctgaacaatattcatggccgccaccggattatcatcccgatgggagtcaatgcgcgcaccggcgtgtcggtgaacgcgttcggccagggtgacatcatgaccatctcccgcgtaggaaagcgcgaacggcagacgcacatctatgaggtgaagtccaccgagggaaccggccggcagatgcctaccatcaggcaggacaacgctgagagctacgtgatgaacggcgttgacgcaatcattctggtggcggtgcagatcaacaaggcgaaagccgagtgtcggatcatgcagcaggtgtcgcctgtcgaggtgatcgagaagtggcggcctatgcgcaaccgctatggtcaagagtgttacgctttcaactaagtatactttgcgcttattatggcccccgttactaacacgggggcttttcttttgggcgacttcttccacggcatcaccgacatctatcggatgtataagaccgatctagattaccccatcgctgcggcggtcatggcgacattgcgtcacatccagctcggtcacgaacgtcgacagatctggacgaacgcaatcatggcggcaatgttcgcgaagggcatcaccttcatcatcaccatcatcggggattccgtcccgcgcatgggctggattgccaaccaggacgcaggctggatcgttgcctgtgtgctgggctatgtcgggattgacaaggtaattcgcgtggttgagcggtatttcccgtccatgaatctcagggggaaaaatgatcggcaaccttaaaatctacctactggcggcccttgccgcctttttgctatggcagggcggaagttatgctctgagcaagtacggcgaaagccggtatgaaagcggcgttacagctggggtgaacaaggaggctgaacgcaggaataaaattgaccgtgagctggccgatatgcgccagcgggagaaagaacaagatgatcgcgacacgtctcgccggattgaccaagcacgcgctgacgctgctggtgctgcttatgctgctgaccggctgcgccagcaactcaacgcagccacttccatcgcaaaacaacacgccgccgctgtcggtgttagcagtgatgccggaacgctctccgatctgctcgccgaactgttctaccagtcagtgcaggcgggtaacgaactggcagcagaagctgatcgatactacatcgccgggcagcgctgcaacgtccagtacaaccgactattgcaacaaaggagtaacaaatgaaagtgagtgataacgggctgaacttcacagcagcctgggagcaattccgcagcacgccttacttcgcaaccgaagatgagcgccgccgtgggatctacacctggggcttcgggcacactggccggaaccctccacgaatcaacatcacccgtgagtcggccatggcgatcctgcgtgaagacctcgcctacgctgagaagaaggtgaacgagtgggcgcataagtccatcacgcaaccgatctttgacgcgctggttgatctggtcatcaatgccggtgaggagccaatccgcccggacaagaaggcaggcgacttcgacgacctggtgacgcaaggccgctgggatgagctgatcgtacagctggagttcttccgcaagcagagcgggaagatcgtcccagggctggttcgccgggcactggcgcgtcaggcgctggcgaaggggatgaactggcgggatgctgaggccgtgggcaggaacgcgaaggtgtaaaaaaaggggccaatcggccccttgttgtttaatgcagcaggaagaaacttaacatcacataccccggcgcgtactcgccgacgttgcagatatgaataacacgcacgtcgatctggcgacccgtgtagccgtccgcctcagtccactcgcgaaggcgcaacgtgtctccggtggaaaagctacgatcccacttacgcaattccgctcgcttctcgccacgctctaccgcctgaaagtggactggcagaattttcagatcgtgaatcacttcacacccccgacaacctcagcgccaattgccgcgtaccctgcgaggtcttcgaacgagtcagtgctgtcgtcagtctgggcgcggcagatctttaggatggattgcagcgtcaccacgtccaggccagtcagcggcgcactctggcggttcgcagacgctcgcacgatgttgaacgcatcagcaatgcggtcgaactggcgctctttgccgttctccgcgccgtagcggcgtccgcgctcctcaagatgacctttcacccgttcgagcacctgaacggcgtcaagaggctctgaggcgctctcatgggcatcggccttttcagtgaccagatagatagccgtgccgtccttccgtgcgcaatcgcggttgagcgtcgcgatgttgtcgagggtcagcgccgactcatctgctacgccgtggtgctggaagaagttggacgggaattcaaccacgtgcggtacggaatattcaccgtggtcagccaggcaatgccagcgggcaatgatggtttcctgcccagccagctcgccgtaggccagaaacgtcaccagcgagttacgcccggggatgttgctaccgcgaaccgggctaccgccttcgctgatctcatagccgaagcgcaggatatccccggcagtgaagcggtcggtaacgtcggctgtctttttcttcttggtggtcatgttttgctcctcagcatttcattagtgttttgcgccagtccgcgccatcaaggtcgacgtagcctaacagatcgggcgtaccgtcaacactccaaaattcgttgccgtcggaaatgaacggctcgttgtcgtagacgtagagcgcgccatccatatcgacagcgatccacgctgcccaccccggcgcagttatcactacaccgttgtagttgaagaccttaaacacccctttagtgattaacttcatgatcgtctccgaagtacggcacgcgcggcgtcgtcactggcgcataggcctcgatcctgaaatcgcggttgcggtcgagcgggaggtagtaggagctgaactccgggtgtacgccttcctgacaccagccgacgaagaagaacggttcaccgctgtcgtcgctgcggccgtcccagtttgtcagctgctcatcggtgtagccgcattcgtcgaaattgacgtaccagaagcggcggatgaggcggcagttgttgcgcaggcggcacacaacccaaaactccatctcgtgcccgtgctcaatgtcaggggtgtcgcccagcgtccaggtggacggtaagaattgttcgaataacggttcattctgtttcatttgcaaaagtcctctacgttgatgaagtcgggtgtcatgaccatgtttcccgcacgcaggaagctcagtccgaagcggtggatcagcgtgctgcactggtcgatgtcgctgtaatgcatgcgacgccagaagcctttcagggtgccgacgtcgtcccagcgaacttgcgggcgatcgatgaactcagcgcggacgaaccggccatagtgccatacccattgcccgggcttcacgtcagcgacttcgatcagcctggtcgggaatgccgggatcttgctcatcgtgctttcacctcgccgtaatagcccacgtccagcaggtcggacacaaccgcgatgacctgcgccttcgcctcttcgtcggccttcttgttggcgatgaccttcatgatgtcgccgcgggtggcgtcgaacatctgctctgacactccgcccttgcggtagcgttcgcccagtttgcaggcatccttcatgagcttatccatctccgcgctatccggcagaaggtcgtacatgccgagatcgcgctggatattgatgtttttgatgccgacagtgcagctgacagcgctggcggttccgacgtatgagcatcccagcacggcagcggcgacgatggcgatagcggtaatgcgtttcatggtcttactccttgttgctgcggatggcggcgatggtttccaggtggcggcgctcttcaatgcggcggcgctcttcgtctgcggcgatgttgcgcatcaccagcagaaacaggatcgccagcagcggcgagaacaccagcgacagcagcgcccaacccagtccattacggccacgacggtcggcggcgatgcctaccagtaaagccagaacaccccaaatgactaaaaagctcatgattctctctcctgttaacaccggccccttgccggtgtgtgtatattagtatgcagtaatagtgcgtgtcaacactatagaatgattccagcgccgtgcgtgtaaacggtggcgatggtcagcagctcaaggcgcagcgccttcaatgccccggatgcggtctttgcgtcgatctcggtggcgtggttcttcgagtcggtgtaagacgccttaaagcggttgtgcccgtaggcgatgcagcgcacgcggccgaactcgacgacgacgcggtaggtcttctccttcgtcttgtcgttgacggcttccaggacgccgaacttcgcgccgggcaggagcatgccgcagatgtgagcgcccagctcgcgggcctcttcgtgggcggtgatcttcttcaactggtcaatcattgcgggcctccttctggcctgcgggcgtgatctcgcacgccccggtagtcaaattccactttgccagtccacggctgacaagtccgttaagcgcggtgacggtgtgggccttgctgtcgtagacccatgcaccggcgcgccattccgatacagcaagccgtttgagcacggcacgctgcctgatacgcagtttcaatccgggcggcctcctgcggccagccatgcagcgtaagctatggaacgggtcagatcgcacttcatggtgatcttgcggtcttcgtccgcgttgacccactgggagaaggtcatgttcagcggcataggcttgccatcagcggccgcaagcgcgtggtgatagctgttcagcgacagcagcaccgatacccgctggcgtgccgagatctcacgcaggatcgctcgcatgcagagggtgatgctccccaacccctcatgcttgcgctggcgtgcgtcccaaaactggtacttcatcgttagcggtggtcgtttacgtccgtccattacgccccctcccacgattcgcccaggtgttttttgatcttgcgcatggcctcaatgatcatctgcgcacgtgtcccgcgatccccgtcaacgtcccaggtcttcgaaccggcgtacacctggcggacgacgatgttgaaagcggacttcttgtgtgtcacgtggaacactttgtaaggtgggcgggtaacgccgccggaaaccttgtaatctgtggagatggtgaacccctccacggttgccgtgtcgatggcggcctgaatagtgatcatgcgatcctcctatgcgatatattcgacggtttcagggatgattgctgcgtatttgcagtagtcgagcgccgggatgtaccagcacgagaacaggcgagtctccccgtggcgctcatcagtctcgacttcgcacacggccgactcgtagaccatcccgctcgcggtggtgacgcggattagcggaaggactaagcgcttccacgcgtcaacgccctggtcgtggtattggttcatcactacgtcggcggcttcgtctgcgcgttcggcagacaatgagtcgtggaatgggaagtaagccacctccacgcaattcgcaacaacggcgacacacttgctcatggtttcctccgatggcccccgaaggggccggttggtttagtatgctgcgtcctgtgcgcgcagcgcgtagtcgtagttggtcagaccggcagcgcgggcgttggtggtgtcgctggcgatgacccaggagccgtctttgaactcaatctcacagtggtggaagttgatgcttttgatgtcctggaggttttcctcgacgatggactgaataacgaccgcggcggtcatgttacggcggctgtattttgcggtgatgatttgtgcagttttcatttcgttttcctcatttcgttgggtgtataaacactatatacacccacacgcatagagtcaacaatatttatcaaaaaggtagctcactgtcgatgccagtcacccgtggccgggccagcatctcccggtattcctcttgggcctgctcctgcgccagcttagacaggcggataacgctatacatcatcttgacgatgaagcgggccgggtaacgctccagtgccagcagctcctcgcggacgacgtcaacggcacgctggcgaccgatgtgcaagaagtacccattgtgggtgtagtgacgggcttgctgaacagcgcggtcaatgatgtcgttaaccaccagcgcttcggcgtgggcttcctggcgggctgcgtagttgcgctgaccttcaacggcatccagcagcttttgcagcagcgcttgcacgtcgcacaggctggcattagctttccactctgcctggttccagtcgtccaggttggaggcgatgtaaccttctaccgcctgctgcatatcgtcgtacatgttttcgtcaagggtgtcgacgttttcgcaaatcagcgcattggctgcggagtcgatgatcaggcaagccagcaggtcagcattcttgaactgagcacgggcttgctcgttggtcatccagctggccggattgccgatggtcagatccagcgcggagaggatttcgttagcggcggtaagatatttgatggctgatttggacattttgcgaccccttgtaatttatcggtgagttactgcctgttcgataaatatattataggggccgcatcgtgtcaatagtgcttacactactctttgatgaattctttgaaatctgcggacgatgtctcgcgccaggtcatcagcctgccgttgacgatcgcgtgacgctcgcagttatgatcgtcccggaatttcaggatggtcatggtgttgatgccggttttggtggtcagcttgcgcatgctgcccgccttcgcgagaagggcaggaatgcttgttacgtggcaaatcaggctcatattgttttcctcagtggttatcacggcagctacccatcagcgggggaacggcatctttgatcgtgtagtacgggttacgggcctcgtgtgggttagcctctttgttcaggtgccccagctcagccattttgtaaattgcatcgcgcacagagtcgcgggaatacggcgttccgtcggccttgaacaccgtggagctgatacggtgcaggatctctcggtaaggtagcgtgccatgctgttcagcacggatgagcgaatacacggcttcctgcaacggcgtatacgtgtgcgcctggcgcttctcatccggatcaaagtgctcatcctcagtgcctgcgtccatatcgtaaacgcggtcttcgaacagccagaccttcgtggcgtcgtcgatgtagataaagctcggacggtcgacctcctgccctggggcgagtttcttctcatacgtgcttttcttcttcgcctcaacgtccttcgcgaacaccggcacctgaaaccccttgagcttaaagcgccccttcaaaccaccctggcggctcttgccgacgttcagtacggtgtagcctgtctccttctggcgagcattcagccccttgccggtctgcgtcttctcgcgcaccaggctgaacgttttgtagaccgcacccttcgctgctgagccaccacgagactcaaggtcgtactgaccggacatcaggcttcccttgctgacgtgggggatgaagatcccggcgcagttgagggactcagcgaaccggtgtccggcagtggtgatcagctgctggtcggtgttgctgttttcgtccatgctcacgccgttgttgttggccgccgcgaggtggaacatcttgctgtcgaagatgaccagattcaccggtcggccgttggcgaactgcaacacgcggctcttctggatgcgcaacttacctggctccatcaggtcggccgggcgcttgaacaccttgatccagtcgcggagattcacgccggtgcggagcgaccaggcggcaacctgcaactcgacgctgtccgggtcttcggtaaagaacacgctaaccccgggattgcacacgcggaagcagttgaacagcgggcgacccatagcgaggctgacagccatctgcaccagtagcgtcgtcttgcccgcgcctgcatcaccgtttatctcgttgatggttcgacggttaagcagcccctcgatcaccgggtcgtagaagtccggcgaggtgtttagcacgtattcgcccgggtcgtagtctttcagcgcaggatcttcaaccagcccctgctcgacttcctccgcgagacgcttcgccacctcaacgcgctgagccgacaagtccatgccgagattctgtttttcattctcctcgcgaacgatgcgctggagttccagatgacgttggcctgcatccttcttcttcggctgcggtgctggacgctcttccggcgcggttgagccatcccacaacggtgtcggctcgaacgtgtcaggctcagcacgcgccacctggtcgaagtacgcctgcatatcggccatctcctgcgagtatgcttcgtcctcctcctcgcgggtcattggctggttgaggatgtcagccgcttcgtgctgcttatcctgatcgcctaacaacgctttccagtcgtccggcgtcattggccttttgttctcttcttgcatgttccctcctgtgttggttcggtcattattcacagtcagtaatacagtgtcaatagcaattactttcccccctgaaaaacggccgaaagttgtaaaccaagtgcacccgcagggggtgtaaacatcgttgtgttacaccttgattttattcaacgttatcatgcacttaactcggtacgctttttaaccacttgtcaaccaaatgagttcagggggcgttaagtgggagggctgcaccacctgaacaccagtcgtttcgcgtaagtcattgatattaaagctccccttgattttcaggagccgaaaattgcctctccctgaaattttcaagtgattgatattaaatggataatttcaggggataagtggaatccctattatatataaaacccatataattacagaaacacgtacacccttacgcac

SEQ ID NO: 34 - DNA, 166618 bp, unidentified
  source 1..166618: mol_type = genomic DNA
atgctcttctcattttttagtccgatagattattctgcaaagaccgtaaaaggtgctaaggcaaaagctatcccaaccgctgacatatttcgtaattatcgcaaatatttcgacactgtagcagaaaactatcttttacaaacatattacataagtggagctcctagaccagaagaattagcacatattctttatggaaatagtcagctgtactggattcttttaatgtgtaataatgtatatgacccattcagagattggattaaaacccaagatgcatgctatcaatttgcgcagcaaaaatatgcagatgtaggtggagaccaaatactctatcacgtggatgcaaacggcaatcgttattataacctcgagcaatatcctgaaaattcaggcatttggtatgataaaggggactttaatcatcagtaccctcaatatactggggctttagctggtgttgacatttatgaagactctattatagaaaatgaaaaactgcgccaaataaacattatcaatcctagtgatattgaagcatttctttctgatattatacgagaaatggaaaaagcacctgacagcgaatacgaatcaggccgatacaaatcccagactaccatcggagaagttttatgattgaaatgaacgattcattaaaatggtttactggtgttgttgaagacagacaagacccgttaaagcaaggaagagtgcgagtacgcgtttacgggcttcatccgtttgaaaaggtgcaaggagctataactggtcttcctaccgaagaccttccttggatgtcagtgattcagcctacaaactcagctggaatttccggagttggctcatctataaccggaatggttgaaggaacatctgtatttggcttatggcttgatgaattcaaaacagcaggattagtaataggaacatattctgcgcacagaaaaactaagccaaactacacggaaggtttttctgaccccacaggtcaatatcctagacaggttgggtcagataccaacccactagttcaaggcgatgaaactgggtatagtgctgtaccaaatatcatccaagatagaaacttggatattggcattaatcctgacgatgctgacctaagcgatattcctgaagacccaaatcctgcaattacaataacagatatgcttaatagggatgaaggtcttagattgaaggtctactgggacacagaaggatatcctaccataggtattgggcatcttatcatggcgcaaaaagtacgtgatatgtctgtcatcaataaaacattatcaaatcaggttggtcgtaccgttacaggaaatcctggtatcattacaatggacgaagcagttgcactatttaagaaagaccgtgataaaatgctttctgacattaaaacaaattcacgggtaggacctgtatatgctaaagtcaacaagtcaaggcagatggctttagaaaatatgagctttcaaatgggtgtaggcggtttagcaaaatttggtaaaatgcttgatgccatgttcattggtgattggaaaaccgcttatacagaagcaagaaactctgtttggtttaatcagacaaaaggtcgtgcttctcgtgtttccatgattattctaacgggtaatatggaatcatatggagttcctgctccaaagccagaaggaaaaaacctgtctgctgcttacgtagaaccaaagtctggaggtaatcctgaagacccatggactccggaagattcaagaattcttttcaaagaacctgagtcttcatataatggtcagtatccatatgttcacacaatggaaacagaatcaggtcatatccaagagtttgatgatacacctggctatgaacgttatcgtattgttcacccaacaggttcatacgaagaagtagctcccgatggacgccgtaccagaaaaactgtagctgatttatatgacatgactcagggtgatggaaatattttaatctctggggataagaaggttaacgttggagggaacgagacctattataacatgtataatcgtcgacagcaaattgatggcgataacacgctttatgtacgtggaaatgaaaccaaaactattgaaggcgatggtactatttttgtcaagggtaacattaagatagtcgttgaaggaaatgctgatatccaagtcaacggtgatgccactactaaagtagatggcaaccacgacgtgaccgtcggtggtaatttaacttggcaagtagcaggtactgtgaattggaatgttggtggggcttggactgaaacaatggcttctatgagctcaatcgcccaaggtcaatacactgttgatggttcacgaattgatgtaggttaatcatggctgatatacttcctattaatacaacgttacgtgaagtaatagaaggtgaatatgttgagcagtactttactgctcaattatctactaacgaaacattaaaatcaataaatattatcgactatcaaccagtatctgatatctctgtgtctgaaacccattataaaggtaattataactcagtttttacttttggaaacgatgtgcttaaataccgtgaaggtgatgagctaaagtccgcttcagcgtgggaggatttacctaatcccaaaactgctgatttgtatctatggaaagcccccagaacactagagaagacatttacctatacagttgagataatatatacagtgacagaagaatcgtctggaggttcatccggaggttctagcgctccaatcataacagaacataaaaagcaaaagatttactctcaaacagttaaaggcaactggagtagatggggcgaccaacttcgtgcttatgtatatgcggggaactaaatggctggactatcatttaataaatgcttaactgccgggcatagtgcgtatcctccgacagaagttaatgctacacaaagtaaagtattcactggtggaatagcggtattagttgatggcgactcaattacaccacacaccaagacggttgaccctcatgatacgcatggaggagttgttcaacctcgcacatccaaggtatttgtaacaggcaaaaaagctgttcaaatggccgatccaatttcttgtggcgacactgtcgcgcaatcaagctcaaaggtattcatacactaatggctattaaagaacccttaaattatcagttaacgcgtactgtaaacgctatcccagacgcatttactggagcaacattcgatgaaattaaaaatcagcttattaactggcttagcgggcaaaaagagtttcaggactttgattttgctggttcgcgtttaaacgtgctattagacttattagcatataacactctttacatacagcaatttagtaatactgctttatacgaaagctttattggaacagctaacttgagaagttccgttgttcaagcagctcagcaaaacgggtatttgccaagttccaaatcagcggctactgcgtctattatgcttgaggtaactcacatgaacccgagcagcacgttgagagttgtaattccacgaggaactaaatttttagcatactcaaaatccgataaagccaacccatataacttcgttgttactgaaaacgttgtggctattcgtgataatgaccaaaaatattggcctattgtcaatttggcacagggacgtattattcgtactcagttgtcatatgacccgaagaaacctattgttattcgcgaccaatcaattgaccgcaagcaggttaagctgtgggtggatggcgctgaatggactaactggacagaccgatcaatggttcatgcttcgtctatttcaacgatttattatatgcgtgaaaccgtcgatggaaatacagaattcttctttggtgagggtgtggcagaagcatctgtggcaggaggagttcttgaaagcaacttcatcggcggattgaagcctactaagggtgcgcaagtcgttattgaatatattcgtactgacggtgaagctgctaatggcgcgactgaatttagttatgcggatactctgcaatatatcgtagtaaatagaatcattgaaaactggtcagattctcctgattatgttggcgctgatggcggtggtgaacctgaagacatcgagcgtattcgtgagctcgcccagattaagcgcgaatctcaaatgcgttgcgtgtctaaaactgactatgaatcattcgttagttcacgctttggttctatcgtacaggctgtgcagtgctttactgatcaggataagccagggtatgcgtttattgcaattaagccaaaatctggactgcagttaactgcggttcaacgggaagacattcaggattatctaaaacctttctgtcttgctccgattactccttcggtaatgagcccagattacttattcatccgtcacaatattaaagcctcttacgcgctgaataagttgcaagaatcagagcagtggttacagtcaaaaattatagactcaattaatagatattacgttgatgaagttgaaatgtttaacaaaaatttcagtaaatctaaattattgacctatattgatgatactgaccattcaatcatcggttcttctgttgatattcagatggttcgtgaaattgtcaactatttcactcttcctagcgcaggtattaaatactataatactattactccgcggacgttacgttctggtgatttggtctttactgttaccccaactgctgaaccgtattcagttaatattatcggaactgacccaaataaaaatggcaaaggaaatatggttattggaccatttaagccaggtgacattaaagagaatactcatatccagccatatactgaaaacgattttgatagaaataccgtcggcgaaagaactcgttggtacaaaatcggtgaagtagattattatggtgataatatttactggagccttggagctattggagccgatcctcttcaatttgaagaccagagtattgagctttactctactcctactcaggatatcatattcgcccgcgatggaacacttatcgtatttgagaatgaccttcgtcctcaatacacaactattaaattggagcctattactcaatgacaattgcaccgttcgtcaccagcttacgaattcataagctatctgcgaatcaggtcaatattcgttgggatgacgttggtgcaaacttctactattttgtagaactggccgaaactcgaaatcaagcgggggaaatcatccccgctgataatttgagttggtcttcactgggttataccgcggataatgattggttcgagcaaaatcgtattgaaccgcttacctattataaaatgcgtgttcaaactacgtcagcaggatttgaaccgtctgaatgggttgaaacagaagagttccaaacttttgaagaaaacgcgtacacgtttgagcatatgcaagaattcagtttagtgaaagaattcattaagcagaagttttctttaaataacatgtcgtatgttaacttcaacacatctgccatgatggcatctttgatgactgagtcttttcaatttagtcctgaacattctcatttgtcagctattgaaaatttcgtagtaggcgaatctggatatcatgaaattcagggacctattgaagcagtctgtgttgataaaaatagaaccatgctaggagaaatagacggaattttgtatctgtttgaaagattccaacatatggttaaagtatcaaacgataaaggacagaactggcaatacgttcagttatttaatgaccgtgtaggaaatcctgtttcacgagtagtcatttatcaatcaagtaccacatcatatgttttaggctatgataaaatcttttacggaaggaaatcatctgacgtacgttggtcatcaaatgaggttaaatttagcgataacgaagtcacgttcgctaaattgggagaccagttaaaattgggatttgaagtagagttatttggtacatatgcatcactacctgctgatgttaccaaatatgcagaagcctttacatgcaatgatgactatttgtacgttgttgcaaaagacactgtccgtaaagttaaattaaaagatgctccaatagacactgaccctttaagccctacatttggtgaaaaggtgtttgaaaaggaagtatctcatataacaggcaatcctaaatctgtatgctttaaaatggattccgttggaggcaaaatctttgcccttattaccggggaagttaaaaccttaggattagacccaacagacccaaggaacgttgtggattctgcaactaaaggcgtctatgtttataaggaaggtacaaatacttggaagcgtgtatttggtaatacagatgaagaaaaacgtcgtatagagcatttatggacgtctatgtcaactgacggaaaggaaatattcttttcatcagctaattttaagacaacagagtacacccaggatattgaacttgagacgaaatatccagagttgatttctaccgcagtaaaaaatgttaacccaattcagtatcactctgataagcattatcacatgatgagtttccgagcggatgaattttctggttgggaaacatttgttcctggaccgatgaggttttatgctgaaccctggtttgtatggatggctcgcgatggtaacagatgctggataagcacagctgaccacgcagttgtcatttataatgatattctttatcagaaaagaatagatatggctgcacagggaactaccgagcgtgttctttcggaagtgtgggataaaggtgacgcaacgttttattgtcctccggtttcatttaacggatttttgcagtatgcttctggtatcatgtttcacgagccagacggaaagctgataggttattatgcatttgattatcgggttcgtgaccaggtaacgcttaactggaaaccaactgatgtaatgtttaaagcgtttctgcagaaccaaacgcgggaagaagactggacacctgaacatactccaggcttacgtgacccagatttgcgtccgtatcttactaaaatgatgccggatagttacttattgcaagatagtaattttgagcacttttgtaagtactatctccaattcctttcagatggaaatggaacacattacaacagtctcgttaatcttgttaagaacaaatatcctcgcgaagaaaatgcatgggaatatctgtggtcagaagtttataaacgcaatatttatctgagtaaagacgctcgtgacgctgtcgtccgtttctttgaagcacgcaagaatgatttctatgctaccaaaggaattgaagactcatataagttcctgtttaaacttctttataatgaagatgttgaaattgacatcgagtcaaagaatacgacagaatatgacattattgtagagagtacaaatatttctgacgatttagttggtcgtacgatttatactgcttctggtcgtagtaatgtgacgtatattgaacgagaataccgggatggtcgtctgttgtggcgtattactattcacaacttatcaggaagatttattgaaggacaagaaattaaatcggaacgtacggactttgagggtattatagttcaaggtgttcgtggaaaggatatgctgagtaataacattgattatataaaccgcagccgttcttactatgttatgaaaattaagtctcaacttcctacttctcggttccgtgatgatgtactgagatttgttcatccggtaggtttcggtttcattggtataacactgttgacaatgtttatcaatagcggtttaaatatgaagcatgttgaaactatcataaataaactcaagaactataaatgggatgcaggactgccatcagtttatcctgatagagttgctattatcgcttcagatgatacaatagaaagagacccaataactaatgagcctaggtattcttcacgggctcaagctggtgaacctttcccgttacctgctaactataatcaagaaaataacaatagtgttatcgctggacaaaaccctggacaacgacgtaaaccgttaagtcctacgtttgaccaatcagcagtaacgtttgccaattatcgtgatttagttaaccaacgtcttaaagacgatgcaggtaatcctcgcgatcctgaaaatccggcacaggtaaaaattgatgagtaattcaacaagagcaagttcaacgcgtagcacaatttatcgtgctatcattacatctaagttcagaactgaaaagatgtacacattttataaatcgattggtccgggaacggaccaaaacacactttttgtttcatttggcaaaagcactccatggtcggataatgaatctgaacctggatttgcacctccatatcccgctgataatgaagatggcgtagttgatgtttggacaaatatgatgggcgcggtcaaaattgaatcatctatgcttgattgtgttgttccaagaagagactggggtgatactagatatcctaacccgcgtacatttttgattggcgacattgttgttgctaactctgcgccatataacagaactgacgctggatttggatggatggtatatagatgtattgatgttccaaaagacggaatgtgttcaattggaaatcttacaagcaaagacgaatgtattaagcttgggggtaaatggacaccatcagctatttcaggttcagctcctcgcggtcgtggtgatgcaaatggtaccgtcgatttaggtgatggatatctttgggaatatctatatgaaattccagctgatgtatcaatcaacagatgcacaaatgaatatattgtagttccttggccagaagagattgaagaatctccagctcgttggggatttcaaaacaacttaacttggcaacaaaacgactttaacctaatctatcgtatgaagtgtaatacgattagatttaaagcataccttgatgcaatttattttccggagtttagtcttccaggaaatactgggtttagacagctgtcaattataactaatccgcttgaagctaagccaatgccaaattcacctaatgttaaggctgaaaaaggttggtatagtgcttctggtcttgaaagacagtcaggtgaaatgatttacatggaaaatcggcaacctattattcgttcaatggaccaaacggaagaattaaacttaattttcgagttttaattatggggagccttcggctccccatttttatataaataggactatactttgatatgaggttaacctatgtatacagataaaggtaaaaaaataattgacgtcggtgagattggtaacgcttctaccggcgacattctgtacgatggtggtgtgaaaattaatgataacttcgacgccatttacaacgccttcgccgaccaacgattatttgcagctggcggcggagcattgaaccaaaaaattcatgcaacaagctattatcaaaagataaaatttggtgatgctaactctgcagggacagttccaatgggggcatgcatagatgctgactgttcagaaggcgcagttcaaatacgtctttcaaagggtaaagcgggagaagctgtattcatcgtaaatagtaatggctcagcatcaaaagctagatccataaaaataacaacaaacggtgaaggcgtagctgatgcatttaaagatggatcgcgagagttagttatcaacaccccaagatgcagaattgagttatggtgtgttgaggtaaaagctaacggtgctgctgtttgggattattcgatttcaagtatgtttggcagcacatattcgccattagaagctacatataatttaacaagttctcctattaatatccgcattggatataatgatgattactccaccgttaaattgttattaagcttcagtgcaaatccaggtggtcaaaccatcaaaaggcaatcatctgaagtcatgcttatgattgacccgactattacttcatcagcgccaaacggaagagtatttgacacagaatatgcagtgttaagaagtggtgaatcatctgaaaatgaaaagatgtattctatttcgtactctattaacgcgcagaaagatttaatatgcacagcttcaacatcttatggaaacgcacgtttggcagttaaagttattgctacacagaccgtaggggtatctcaataatgaaacaaaatttgatagtaggccaatcagtagatgatgggtctggtgattacctccgtaaaggtggtcttaaaattaataacaactttgatgatttatattcagagttaggtgatggttcagttccattcgcagcaggtgcatggaaaacttttaaagctagccctactggaactactttaaatgctaagtttggtcaggcctttgctattaatacccaggcagcaagagttaacgttcagcttccaaagggtacagccaacgactataacaaagttattaaacttcgtgatgtttggtcaacctggcgattaagcccaatcacagttattcctgctcaaggcgatacattaaaaggttcagcttctcctaaaattttcaatactaacttccaagatttggaattggtttattgcgcccctggtcgctgggaatatattgaaaataaaacagtagataagctaactaatggcaacttaagtactgtagcgaaaaaatcaattattgctactgcgggtcagactgactttcttaacatttttgatggcgtagactataacgaagactcacttaacgtatatcgtcgtggtaatattttatactacggtgaaaccagcgttatggataaagctaatgctgactacggttctcctggagcagtagaaggtcaattggtagaattaaacggtaaagacattcgtttaaaagttccatgtgttgaaggcgaagtaataacattcgaaaccttcttagatggaattggtgtttatcggtcttcatacaacaagttggctatccagatacgagattcagcccagactacatcccagacgattcctgggtcaattatagtagataaccttgctactctccgcagaatcactctggatgacatgggtgtacttccaggcgtaggggtaaatcctaactcgcttgaaatttcattgaacggaaaggaattactcgaagctggaactgctggtcttcctttattttattgtgaaggcgcggaaggcggatacgcagaagactgtataaacaatggtggtcaatgggtaaattctaaccaagattatagactggaatttgactcaactggtactaacgtcgaagctattatttttggtgaggcgtttgaagataaagaccttcttaccgttcgttggttcaataataacatcggtactactatggatattgacgatatcatggcagaaaccgaccaagtgtatatgaatgctgagcaattagtaactctaaaaaatcgcattgaatacactaactatgatgaaccaaatcagaaaaatatgcgtcctgtcgctgatgatgttatgattaaagtcaataacattgcagcattctttgacgtaatttatccgattggtactatctacgaaaacgcccataaccatgcaaaccctgctgactatatgggatttggggtgtggaagctttactctcagggtcgtgttactgcgggttggaataatgattcatctgacccttattttgcgcgtaacaataataacctaaacgaaaacgggcaaccatcgttaacagcaggtggaacagttggtgatttgacatttacattaggaaaagaacacattcctgagttaatgtcaagggacaaagttctaatttcagaccctgaacatggcagcgtagttattggcggatgtcaattagacccagacgcacaaggtccaggttattctaaataccgtgaagacactgttgcagtaaacaatggtgtagttccaaatgacatcactaaaattcagccaacaatcaccgtttatcgttggattagggtaggttaaaatgactattgaaactaaaactcgtgaaggagctaaagttaattcaagattaactgctttttcagaatatcgtgtagacccacagaatatcgctgtgggaaataaggctcctatagggagcctaacctttgaacaaatggatttaggtgtttggtatccaaacgcagaagctgctattaatgatttgatgtcattacagtcagcagaaattggaactattatttgtaatgacaccggaatatctccacaaccagcacagcaaattacgcgtgctactttttcaggcgtagtttcgttagaacctaaagaagacggttctgatggtgacccagtaataattcatattctcggattgccgattagaattgcgaatggtgatgacttcgcagctgtagctaccaggtggtatgataaggtaaaagaattagaagctgttggaaaggtggttcaacaggttactcaatcacctgcaactcctcagtatgttgatattattcatctggattatcagaaccataattttgaaacatataaaaaatatggtttaactgttgagtttactgttacttcacctgctaaagcgggttatggacaatgggacgctattggtaacgaaactaaaaccttcggtgcaaacacatttacattccactattttagaaggatgggataatggcccagaataactataatcactacagtgatttggccaaatatacgatatttgacccagcaaatacgcaatggccagttgctacaaaagacgtccaatcagcgttagcgttgattggaagctgggcaagaactgacactggattacctgcagcatctccaaccgtagcaggtataattcgtacagctacacaggccgaagttgaagctggaactgtaggtaatgctgcggttaccccagctacattaaaatccacaattactcggcctgaagcaactaccgcaattcttggcttaacccgatacgcaactaataccgaagccgcagcattaacagcagcaaacagaactattacagctgctgctcttggtcatgtgtttaaaactgtgaaagcccaagaaaacgtagatggaactgttaggttaacgactgcagctcaagctcaagcaggaactgatgaaaccactgcagtaactcctaagcgtgttgtagaaatgattggaaagttcagcgtcagtcctcctagttatacctctgcaacagaaagcaacttgggattagttcgtgtcgcaacccaagctcaggtagcagcaggtgctgttcacgatggatacgcagtaactccaaaaaccttcatggcatcaaaagcgtctgacagtgtatttggtatagtaaaatttgctaaagattcagatgttactacagcaacagctaataacctggcagttactccaaaaagtttgcaagcgttaaaatcaaccaaggataaatatggattaacccgattatcaggttctccaactactgattcttcattggcggctgctgcgactgatgctgtctttaaaactcgtagaataaacggaaaaactcttgataatgacataacaattactaataatgatattaattgttatacaagacaagaatctgacgggcgttacatgccagctggaaccagagtaggtaatgttacttgggttgaaggacaatcttggattagtcgaggtgcaacgtttacatgtaatgcgccatgggaagcttctagtagattagctctaaatgttaatgtaaaatttgagcgtaacaacgacggatatgacaatcgtattttcagatttgttgtaatagttaacggttcccaatggggcggtgaacttactcttaacatcgaaaatactaaaggcggacgaaatggtcattcatggagatttgaagcttacgcatctagcaactttttcttcaataacattcctccaaatgccactgttcaaataagaccaacagaagacagtcgtattatattttatgactgcatgcttacattctgtacaaatagaccgtaaggaataatatgaccaaactagtagattcgcttccgttcgtagacggaattccggaagattttcaacagagaattaactggataaaaaatacagagcctcttaatggggcttcaacccgctatggaaatgatggagaactgaatagagcctctgtgcagattcagaaaaatgtggttcaagtacataacgacttgagtaatgttggaactgctgtagaaaatattcaagtagatgtagaccaaatcaaaaaatcattagaaatcacaggttcttctgacgctattgagcaggtttatatcaataaaaagaatattgaaaagcatgatggacaaattcttaaattagaagaagacaccgaaaaacttcgaactgaccttgattttctcgaagaggatgtaggtgtttatgattctagtaaagatgactattacagaacagttcgtgataatatagtttgggttaaacgtgaaattggtgcgtatcctgggcaagatattaacggacagccgaagcaagactctccgggttctggtatgaaataccgaatcatcaataatgcgtcagctatagtaaaacatgacgagcgtattcaggcgctagaggatgcatacaatgattcagacgtaggttctctgactattgaagtaaatgacctgcgtaaagaagttggtcctaaatccggagctacgtcagcttcaatttatgcaaggcttgtgaataacgctgatgctatttccgcagctaataatgaaatctttgctattaaccaagccattgattttaccaatccagtaaaaattggagctcgtactactagattagaaaacgattatcgtatagttgacgcaacacttaactctgcacaaaccgggttagttcctcgtgtcaataatattgatgctcgtttggggtcttctgataagcctgatactattgaaggaaaaattagttctctttcaactgaccaaggatacatttctgatgttgtaggacgtgatacttcatcagggcttcagggtcaagtagcatggataaaccaacaggttggtattgttcctagcgagcagccgattcctcctggatcagtcttagcaagattgaccaatgttgaagggatgcaaaactctcagcagtctgctatccaggacattcaagtagaacttggcaataacaacgaagggttaaaaggttctgtatttacgttacagactcaaatgaatggtgacttttcgtcagaaaatccagttcaacgggatggtgtatacgctactgtagtagaattgcaagataaattcgttactgcagttactgacgtagaacaaactggggcgtatctccgtaaacagggcgaatggtttaaaaaaccttcatcaataggtgaattcagtaaaaaagatttcactgttgatttaagttctgacgcactggtaaatcctaactcattgatcgcagcttcatttaatgctggcattcgtattgtcgatgatattattgtcgatgacgatggcgtattttgcgtagaaactgatacagttatcgaagcttctgattcagataaaggcgtgaaaattgttattctcgttaataacattgaggtgttttcatacggacttggtgttaaggcggtaacgggcgagcagttgattaaaaccaagaaactcgttgatttttcatctggtgatgcaatcaaaatcgtgtatagagctgcttcagaagaatcgcaggttcttgttaaaattaaatctttggatattactattcatccagctgtataacaaaagggaccttcgggtccctttttcgtataaatataatataaagaggagttcatatgtcatacaacacatacaacccaaaaacgcttaaagacgctatacttcgacgtctaggagcgccggtaattaatgtcgaagtaactgaagaccaaatttatgattgtattcaacgagcattagagttgtatggtgaataccactttaacggattgaataaaggttatcaggttttttatattggaaaagacgaagctgacaacgcaagatttttaaacggtgtgtttgatttgcgcggtcgtaatgtatttgctgtcacccaaattgttagaacaaatgtaggttcattaacttcaatggatggtaatgcgacatatccatggtttaccgactttctaatgggaatggcaggaattaatggcggaatggggtcaagctgtaataaaagttatgggccaaatgcgtttggtgctgaccttggctattttactcaattgatgacttactggtcgatgatgcaagatttgcttgctcctctcccggattattggtataactctgataatgaaatgcttaaagtaatgggcaacttcatgaagggtgacatcattgtctgtgaatgctggaccaaatcatttatgaatacagatgtgatggtaggcaatacggcaggatacggatttgccgggccgcaaactgctgataattggggattaggagatagataccaaaatcctagccttcgtaataatggccaatatgccggagaaggtaacacaaacagagaaggcgcgtataacaaccgctgggtaaaagattatgctacagcattaactaaaaagttgtggggtgaaattctgtttaaacaccaagggctgcaattagccggtggagttactgttgatggccaaacacttaaagtagaggcccaagaagaaatcgagaggctccgagaggaacttgatttacttgacccgggttgtcctattctgttggggtaaaagatgactacatttaattctagtttattcgctcgccttgaggattaccgaggatacaataaaactaatgagacagaaattctcaatccttatgtgaatttttataatcacagaaatagccaaaccctggcagatgttttatcagctgaggctattcaaatgagaggaattgagttttatttccttcctcgtgaatacaacaacccagatttgctttttggagaagacccatcaagtaaattcaccaaggcttggaaatttgcagcttacttagattcctttgacggttattctggtgataatacattctttagtaagtttggtatgatggttaatgatgaagtcaatctgactattaatcccaatttattcaagcatcaaactaataattctgaaccaaaggctggtgacctgatttattttcctatggataattcgttatttgaaattaactgggttcagccgtacgatccattttatcagttaggtcaaaatgttcaacgcaagattactgcgcagaaatacatttattccggtgagcagcttcaaccagagttgcaacgtaatgaaggcattaatattcctgaattttctgagcttgatttagaaccaatcaaaaatatagatgctcttgctgatatttctgacgtgcagtacgcagaaagcaatgaaatcaataaagaagcttctgaatacgttcatccgtattatgttaataatggaagaggacttgagtctcctcctaaagcagattcatttgatgacggatttttcgaataaataaaataaagatgggacctttgggtcccttaggagaaatcatgtttggacatttttataattcgtccttgcgccgatacatcgtgctgatgggagatttattttctcatgtgcaaattgctcgttggcgtgaagacactggactaaaatatattaaagtacctatcacttacgcttcaaaggaaaagttcctttctcaactcggaaaatggactgctatccagtctaccgagaataaagcaaagatagaaactgttttgccaagaatgaatttgcacttggttgatatgcagtacaatgcgatgtataaaacatcacaattaaacagaaccaaatcatataaaaccccttcaaaaattacatctcagtataatcctactccgattaagatgatttttgaattgggaatttatacacgcaaccaagatgatatgtatcaaatcatcgagcaaatcgttccttattttcagccgcattttaacacgactataactgagctttacgacaaagacacaagctttaatcgtgatgttagaattgtattacagtcattttctcaggatgaagctgttgatggagataatatcactcgtcgtagattagaatggtcgctgatgtttgaagtcaatggatggttatatcctcctgttgccgaagttgacggcgaaattagaaccatttatttagatttcttcgctaacagcaaagagctaactccagaaggaaactttgaatcagtagatagcgaagtcactccacgagatgttcaacacgaaaattgggatggttctagtaaacaaacttattctcacgatattcctattccggtaaatccggaggctcctggaccgagaggtgaaaaatgagtgaattacaattagatatggctaaattattagacatcgaaggaattcctggaatagaaggacaagaaattccagtttatgaaaaacttgaattagttgaagttaaatctaatccaaatgaccgtaaacctgacctcgaagatgactattcggtcgttcgcaagaacatgcacttccaacaacaaatgttaatggacgcagctaaaatatttttggaaactgctaagaatgctgactctcctagacacatggaagtatttgcaactcttatgggtcagatgactacaacaaacaaagaaattcttaagcttcataaagaaatgaaagacattacttctgagcaggttggcaccggaaagggagctaatcctcatcaaggaatgaatattcaaaatgcaacagtctttgtagggtctaccgctgatatgatggatgaattcggtgatgcctatgaagcacaagaagctcgagagaaaatagtaaatggaacagactcaaccgtttaacgttctgagtgatgcccatcctttaaatgacgggaaacaggtggttattcgccacccgtctgaaatggaaacgaaaattgaaaatggagttcgtttctttaaatcgcaatgggatgataagtggtatcctgagaaatttgaagactatcttaagctgcatgggatagttaaaattcgcctgcaaggtgaagacccagcgcattttcaaacgtttaaggataaaaataataagcgcactcgttatatgggattgcctaaccttaaacgagcaaatattaaaatgcaactaacccgtgaaatagttgcagaatggaagaaatgccgagacgatattgtgtacttcgcagagacctactgtgcaattactcacattgactatggtactatcaaagtccagctccgtgattaccagagggacatgctggaaatcatggcagccaaacgtatgacttgttgtaacctcagtcgtcagctcggtaaaactactgtagtagcaatctttcttgcgcacttcgtgtgttttaataaggataaagcagtaggtattcttgcgcataaaggctcaatgtctgcggaagttctcgaccgtactaagcaagcaattgaattacttcctgactttcttcagcctggtattgttgaatggaacaaaggctcaatcgaattagataatggctcatctattggggcatacgcttcgagtccggatgctgtccgtggtaactcctttgcgatgatttacattgacgaatgtgcgtttattccgaacttcatcgatgcatggcttgctattcaacctgttatttcatcaggtcgtcgttctaaaattattatcacgactacaccaagtggattaaaccacttctatgatatttggactgcggcagttgaaggtaaatcaggctttacgccttatactgcaatttggaactcggttaaagaacgtctatataacgacgaagatatgtttgatgatgggtggcaatggtcacttcaaactatcagtgcttcttctcttgagcagtttaaacaagagcactgtgcggaatttcatggcacatccggtactctcatttccggtatgaaacttgccaatatggattggattgaagttactcctgactcgcacgggttttataaatttaaagaagcggaagcagaccacaaatatattgcaactcttgactctgctgaaggacgcggccaggattaccatgcactaaatattattgacgtaactacatctgaatgggaacaggttggagtattacattctaatacaatttctcacttaatcctcccggatatagttattaaatatctaatggagtacaacgaagctccgatctatatagaacttaactctacaggtgtttctgtagcgaagagtctttatatggatttagaatatgagaatgtcatttgcgattcaatagttgatttaggaatgaaacagacgaaaaggtcaaaagccgtcggatgttctgcactaaaagaccttatcgaaaaagataaactcattattcaccatcgtgctactgttcaagaatttcgtactttctctgagaaaggagtatcctgggcggcagaagatggatatcatgacgatttaattatgtcactcgtaattttcgcatggttaacaacacagcaaaaatttgctgatttcgtggataaagatgaaatgcgtttagcatctgaagtttttaaacgcgaattagaagatatgaacgacgattacgctcctgtagtgttcgttgacgccgtgaatagcgcagaatatgcgcctcaagaacatggtctttcatttgtataaataataaaaagcaaacaacattgaggatatatcatgcctttagtctctcctggaattgagctcaaagaaacgagcgtacagagcacggtagtacttaacgctacaggtcgtgccgcaattgtcgggaagttccaatggggtcctgcatatcaagttactcaaatcactaatgaagttgaactggttgatatgtttggcggccctaataaccaaactgctgattactttatgtcagcaatgaactttctgcaatatggtaatgatctacgcaccgtccgtgtagttaaccgtgaagctgctaaaaacgcatctccattggttgataatattgaatggactatcactactgctggtagtaactatgaagttggtgataaaattacggttaaatatgcagaccaagtcgtagatgacactggttcagttactgaagtagatagtgacggaaaaattaagtcggtgttcattccgacatcgaagattattgcatatgcaaaaagcattaatcagtacccagatttagggtcttcgtggacaactaccattacttcacagagttctggtgtttcagctgtaattactttaggtaaaattatttctgagtctacagttttactgactgaacatgaaactgctcatgaagaaatgacaaaaaccgaattccagactgctcttgctaagtataaaatgcctggaattgtagctgcgtatcctggcgagctcggaaatcagttagaaattgaaatcgtatcaaaagctgcatttgataaaggtgaacagctgacgatttattcggatggtggaaaacgcgcttcgactgcaaaagctgtatttggatatggtcctcagaccgatacccaatatgctatcattgttcgtagagatggcgcggtagtcgaatccgcagtattatcgacaagccgtcaagacaaagatatctacggaaataacatctttattgatgattatttctccaagggttcttcacgctatatatttgccactgcgcaaggatggcctgaaggattttccggtgttattcgtctgggtggtggggtttcagctaatgaatcagttactgctggcgatttaattcaaggttgggatttatttggtgaccgtgaagcattgcgtgtaaaccttctgattgctggtgcttgcgctggtgaaactgatgaaatcgcaagtacagtgcaaaaacatgtgtcgtctattgcagatgaacgtcaagattgtttagcactcatttcaccaccaaggtcaacgattgtaaatattcctctgacccgtgctgttgataatttaattgattggcgtcaaggtgaaggaagctacgactctgcaaacatgaacatcaatactacgtatgcggcaattgacggcaactataaatatcagtatgataaatataacgacgtaaaccgttgggttccgttagctgctgatattgcaggactgtgtgctcgtactgatgatattgctcagccttggatgtcaccggctggatatcgtcgtggtcagattttaaattgcatcaaattggcaattgaaccgcgtcaggcacatcgtgaccgcatgtaccaagcaggtattaacccagtgactggtcaaggtacaggtgaaggtttcattctgtttggtgataagactgcaaccactgttccaactccgtttgaccgaattaacgttcgccgcttgtttaacatgctgaagaacaacatcggtgattcttctaagtggcagctgtttgaattaaacgataactttacccgtagttctttccgtatggaaaccagccaatacctcgcaggtattaaagctctgggtggtgtatatgacttccgagttgtatgtgataccacgaacaacactccggctgttatcgaccgcaacgagtttgtagcgagcttctatatcaaaccggccagatcgataaattatatcactctgaacttcgttgctacggcaactggagcagattttgatgagttaatcggaccacagtaatatgaaccccaggacattctggggtcatctaatctttagatgataaattatattaccgcaaactttaatagcctctacgatgatgtagtcaatcgagaggctatataaatatctataggaaacaacgatggaattaacagacatcactcgtgcgtttgaatctggtgactttgcgcgtcctaacctgtttgaggtagaaattccttatctgggtcgtaacttcagtttcaaatgcaaagcagcaccgatgccggcaggtatcgtagaaaaagttccagttgggtacatgaaccgtaagattaacgtcgctggtgaccgtacttatgacgactggactgttaccatctataatgatgataaacacgaagtacgtaaggcaattattgcttggcaggctcaggcccacgctcaaggcaatgatatctctggtatgactccagctgattacaaaaaagttgctactgtacgtcaatttagtcgtgatggcaaaactatcacaaatgaacacaccattaccggtctgtggccaactaacgttggtgaagtacagatggattgggattcgaataatgaggtagaaacgtttgaaactacctttgccatcgactggtgggaataatgctatggggcttcggccccgtatcgaagttctgtgagttatttgcttaaatatctgacaaaacttcgatataaatatacttatagataatttcggagactccaatggcctttcatattttggacttattcgctccgtgggaaaaacgcgacgaagctgaatataagcaacaaatcaacaatgacctagagtcaatcactgctccaaaatttgatgatggagctcgtgaagttgaatcaaacgaaaacgaaatccagtataattcattcaaccaaatgatgtttggttccaatgaacctggaatgaaaacaactgctgatttaatcaacacttatcgtagtttaatgaataactacgaagttgacaatgctgttgaagaaatagtttctgacgcagttgtatacgaagacggtcatccagtagtttctcttgatttagattctaccgacttcagtcaagcaattaaagaccgcattcttgaagaatttaatacagttttaacatgccttaatttcgagcgaaaaggagccgaccatttccgccgttggtatgttgactcaagaatattcttccataaaatcgtcaacaccaagaaaatgaaagacggaattcaggaactgagacgtcttgacccgcgcaacttacaattcattcgcgaaatcgttaccgctgatgacgctggtactaaaatcgttaaggggtacaaagagtatttcatttacgatactggcaaagaaagttattacgcagatggtagattatattccgccggaacgaaaattaaaattccacgcgatgctatagtatatgcacattctgggctagttgattgctcaggtcaaaacatcattggttatttacaccgagccgttaaacctgccaaccagttaaagctactagaagatgcgttggtaatttatcgtattactcgtgctcctgaccgtcgtgtgttttacattgacactggtaatatgccttctcgtaaagcggcagcccatatgcaacatattatgaacacgatgaaaaatcgcgttgtatatgatgcatcaaccggtaagattaaaaaccaacagcataatatgtcaatgacagaagactattggttgcagcgtagagatggtaaagcggttactgaagtagatactcttcctggtatgtccggtatgagtgatatggatgatgtccgttactttagaacagcattatacatggcattgcgagttcctctttcacgcatgccggatgcaaataatcaaggcggtgtgcagtttgatgctggtacgtcaatcacacgtgatgaacttgattttgccaaatttattcgtagattacagcataaatttgaagagattatgcttgatccacttcgcactaatctaattcttaaaaaagttttgtctaaagatgagtgggaagacgaaataaataatattaagattgtgttccataaagactcatatttcaccgagttgaaagatgctgaagttatggagcgtagaatcaatatgctcacaatggctgaacagtttatcggcaagtatatttctcataagacagcaatgaaagatttccttcagatgtcagatgaagaaattgaacaagaagccaagcaaattgaattagagtctaaagaggctcgcttccaagaccaagaaaatgaagaggatttctaatggaaaattatatttccgcaattgaatccagagacctcgtagcagccaaaaaagcttttggtgcaattatggctgaacggacatctggtttaattgaagagcgcaaaaaatttatcgcagcgtctgtcatgattgagggtgaagagcccgatgaggacgaagatgaagacgacgaagacgaagataagtctgatgaagacgaagacgaagaggacgagtaatgcttatactgcctgaaaatcatgaattagttatcgacactgtcgaagctcttcttcctgaagcccaggcacgttttgataagttgtccgcagcgctctctaaagatgatataaataaaattgtagagaatcttgttgtttctgagcctgatttagcagttgctttaggttcaatcaatgaagctctccaattgaatgaattcatcgttaaacatgttgattctaaaggtactattacacgtactaaggatcgtaaaacacgtgagcgtaacgcgttccaaacaactggactttctaaagctaaacgccgtcaaatcgcgcgtaaagcagtaaaatcaaaacgtgctaatccatcgactcaaattcgtggattacgtaaacgtaagaaagcacttaaacgccgtcaggctctggggctaagttaatggaaaacctcaatgaacaacttttaattgagcattggggtcaaccgggcgatgtaattgatggtaaacccatgctggaatctattatcgttgaaggcgaaaatgaatctggcttaaaacctggcctgtatatcgaaggtgtttttatgcaggcagaagtagtaaaccgtaataaacgtctttatccaaaacgcattcttgagactgctgtaagtcgttatattaaggagcaggttgctactcgtcaggctctaggagaattaaaccatccacctcgcgcaaatgttgacccgatgcaagccgcaatcattatcgaagatatgtggtggaaaggcaacgatgtttatgggcgtgcaagaatcatcgaaggagaccacggtccaggtgataaattagccgctaacatccgtgctggttggattcctggtgtatcaagccgtgggcttggttctttaaaagactcaggaaaaggatataacatcgtacaagaaggctttcgcctgactgttggtgtagacgcagtttggggtcctagtgctccggatgcatgggtacaaccgaaacaaatttcggaaaatacctcggcacaagttgccaatagtgctgatgatgcttttatggctctcgcagagaagttaaaagcgttataaataattatgtaacttaacacaggacatcaaaaatgcttaaagaacttttaatgaccgaagctaaaactatcgatgcttccgtcgctcttgacagtattttcgaatcagttcagctttctccggaagctaaagctaacttcagcactgtattcgaagcaacagtcaaaaaacacgccgtagctctggcagaatctcatattgaaaagattgctgagaaagcagaagaaaaagttgaagaagaaaaagaaaaagctaaagaagaagctcgcgaagagctgaaagaagctgcttctaaatactttgaccatatcgctgccgaatggatggcggaaaatcagctggcggttgaccgcggtattaaggctgaactgtttgaatccatgtttagcggtatgaaagaactgtttgttgagcacaatgttgtaattcctgaagaatcagtagacgtagtcgctgaaatggaagaagaacttgctgagcaaaaagaagaaactgctcgtttatttgaagaagtttctaagcgtgatgcttatatcaattacgcccaacgcgagtatgctattcaagaagcaacccgtgaattgactgatactcaaaaagagaaagtagtttctctgacagagggtatggattattctgactcgttttcaactaagctgaaagctattgttgaaatggtgcagggttctgtagagcagtctgtaacggaatctgccgatataaatactatcgacaaagaagcagacggtttaaacttcacaactgaagcagtcgaagaaactcctgcgactaaaaccccatccgttatggatgcttatgtagcccaagcggctcgtctttcttaatttaaaaggttatacaacacatgaaaaagaataaacttatcgaaaaatggcagccgctgcttgagaacgaagctctgccggaaattgttggcgctagcaaaaaagctctgatcgctaagatttttgaaaaccaggaagctgatattaatcaggctccggaataccgcgatgaaaaaatcgctgaagcatttggttctttcctgtctgaagcagaaattggcggtgaccatggttatgatgcacagaacatcgcagctggtcagacctctggtgctgtaacccagattggaccggcagttatgggtatggttcgtcgtgctatccctaacctgattgctttcgatatctgtggtgtacagccgatgtctaacccaaccggtcaggtattcgctctccgcgctgtttacggtaaagaccctctggctgctggtgctaaagaagctttccatccgatgtacgctccggatgcaatgttctctggtcagggtgcaactgagaagtttgaagcagttaaagctggtgatgctctgactgttggtgatatcgttgttcacgatttcgcacagactggtcgtgctcatctgcaggttgttgaagatttcactgtagacgctggtgctaccgatgctgctaaactggacgctgcagttactgctgctctggaagctggtaaagttgtagaaatcgccgaaggtatggctacttccgttgctgaactgcaagaagcatttaacggttctaaagataacccgtggaatgaaatgggcttccgtatcgataaacaaactatcgaagcgaaatctcgtcagctgaaagcgcagtattccatcgaactggctcaggacctccgtgctgttcatggcatggacgctgatgctgaactgagttcaatcctggctaccgaaattatgctggaaatcaaccgtgaagttgttgattggattaactactccgctcaggttggtaaatctggtatgacccagactgttggttctaaagccggtgtattcgacttccaagacccgattgatatccgcggtgctcgttgggcaggtgaaagctttaaagctctgctgttccagattgacaaagaatccgctgaaatcgctcgtcagaccggtcgcggtgaaggtaacttcattatcgcttcccgtaacgtagttaacgtactggcagctgttgataccaacgtatctccggcagctcagggtctgggtcgtggttataataccgacaccactaaagcagtatttgctggtgttctgggtggtcgctaccgtgtatacatcgaccagtatgctcgtcaggattacttcaccatcggttataaaggtgctaacgaaatggatgctggtatctactatgctccgtatgttgcactgaccccgctgcgtggttccgatccgaagaacttccaaccggtcatggggttcaaaacccgttacggtatcggtattaacccgttcgccgattctgctgctcaacagccgaaaggtcgtattacctctggtatgccttctatcgtcaactctgttggtaagaatgcttacttccgtcgtgtatgggttaaaggtatctaataccaataagggagccttcgggctccctttagttgttttaatggatataaataaacttataaatccacagaggaaagcgcaatggctaaaatcaacgaacttctgcgcgagtcaactacaacgagtagcaacttaattggtcgccctaatctcgttgcattaacgcgcgcaaccactaaattaatctataccgatcttgttgctatacagcgtactaaacagcctgtagcagcactgtatggtattaaatatcttaaccctaatggtgacctgacgtttaatacgggtgcaacttatgcaggtcaaatcggggcgacggaacgtgagtcaattgaagaactcactatgtcaaataaagactcattcaataaagacgatatgttcaaatatcagaatgtggtctttaaagtacttaaagatgccccgtttaccgatacagcagaaaccgacgaatttggaattgtatctgaagcagtagcagctaataatattcgtatgctgtcagatgctgcagtcactgaaaaatttgaaggacccgattcagacccaatcaccgaagccagttttaaaattgataaatggcagacccaggttaaatcacgtaagcttaaaacggatttaacggtagaattagctcaagacttagaagctaacgggttcgatgctccagagcttattgatgatttacttgctactgaaatggcagaagacattaataaagacatcctgcaatcattgattacggtttcttctcggtttaaagtagctggtgtatccgataaaggtgtattagatttaactaagcaggattctgctccggaacaaggtcgtactctgtatcgtttcatttgtgaaatgaattcagcagttcaacgtaatacttcttattctggtacttatgcagtagcatctactcgttgtgctgcggtgctggcagcttccggttggttaatgcagaagaatgatggcactattccggacaacgcgtacggtatgctgaataacggcttacctctttattgtgatactaccagcccagttgattacgttattgttggtgttaaagcagaatttggtgggaaggaaactgtaggttcattattctatgcgccatataccgaaggcttggatttagacgaccctgagcatgttggtgcatttaaagttattgttgacccagctagcttgcagccttctgttgctttactggtacgatatgcgctgtcagttaacccatatactgtaggattggacgaggacgaagctcgtgtgattaatgctgcggatatggataagatggcaggaagaagtaagatgtctgttatgcttggtgttaagttacctaagcttattacggactaatttatgggagccttcgggctccctttttgctataaactaaatatgtcaaacctcggggagtattcctcctcgagggatttaaacactttcttatcatatagattaacacattctatcccgtgcctgcgagctatatcaacagctactctcgtccctccagatacactcccgcatcttttctcaggcgcccaatataataccttatctacaggctcagtgcattctaggcccaatacctgcatagaattccgtgcgaataaagtctgcactatcttcgagcattcatcccagtacgacgtaacttctctcgccttaatgatgcttttgattttggcttcgtttgataattcagaccatacaacaacacctgtaccaggaacatggccacaaaagccagaataaggaataatcctacaagaatttgacctatcgtatttcgccaaccacgcttcatctgaacccggagctccacctgaatatgaaaaatgcccctcttccgagaggcgttgacctattgtagtcattagactcagaactctgcgtggcgcttctcgtgaaccaataagcgccaatctcattattctaaaacctcatgccatttactacgaatagtgttttgaattaaagtagtgatttctttcttaacaacagaagggttatcagcgaataacatatcatgaccttcacgcgctgcttcgttaatgatatctttcatagtcagacccataacacgaccgaaatctttagcagttacagtaccaatatgagacagaacgttacttacccggttccaggttacatattcggaaaagatttccagaacacgcttatcattctcggtgagttcaaccttcgctttaataggcttatcggatttagccttctcactgaacttagagttcttacacttaatagcaacacgagtaccattattgaagaacttaggatgaactggcttaagaacatagccttcagctacgccagtttcagaagaagcctgcggaccgaacacatgtttatttgcatgttcaaggtcagtcgtgtcaacaagctcattatagtaattgacaatagatttaaagtcatttacgtactgagatagctcagcgaatgaaccacgaccaagcagtggagctaatttaagaccaaggccagtagcaaacgattctactacgtagtcgtcccaataaactttttcattaccggagtccgacaggatatcaaacacgtagaaatctttctcaccataatctacgcccttctgaataccaccgccagcaaattcaccaaagatttgaacagatactaaatccatggcgttcagcatattctgcattttagcgaaagaattcttgtacttcttcatgataatctcatgaccaaagaagctttcaccttctaaaataggaccagtacgcttagccggaacaatttcggtaggggtaataatcacactgaagttagtgccatgaatcttctcacgagccacccactcaacggtatgcatatcaaaaccagcaccgcgaatcttctcgatgaacttaccgttgtaatgattctcgagactagaatatttctcaaacattataatttccttagaatgtgattttcataaagtcagtatcaccgttacgctgggaactggtataatttgtaacaaatccttcatcatgcaaataattaagaacacttgtaatatgtttcttaactaaactgctaggatacataattaactcacgttgacccgctaaagcggttttctcaatctgggttaatacttcttcttttgctgcactcaattcttctgtagcaatattgatggctgtattagccattctatcggcaaagttcataatttttctctcaataaataatataaaaccaggagtctatcttggtcaaaatggtatcagaggatttcccctgagcccattataccacatcgatttttaaagcaattaataaccgctcggcacgaagcgatacatgatatatccgcttttagttagcatgatttcaaattgacttttgcttccaacctcaagtactaatggaatatctttatccatcagcatccaatcaatttttccataccgttcattaatcaaatccgttattttacgtgcaccacttttatagtagtaagaactctgaacagccatcattttactaacaaatttagatgcaaacaaccagacatttaccccattagcagctggcgtaaatttcttagaaagcatttcttcaaatcgttctactacaattgggtctactttaggcattttcataataacctcatgtgtttaacaagtttcttatgacgagattttataccaacgtttgttaagcgtttccgataaacgactttttctttttgcttaaacagttcgtgtgctttctcaactgagacccataatttagcagcttctgctggagtgatatctaacgcccttgcaatttcttgaaaatcttttccgctttcatgcatcaagtgagcttgtaatgctttcataataacctcatctatgtgacgaggacataataaaccaatccgtgaatagcaaaaaagggagcccgaaggctcccgaatattacggatagataatacctgcttccagcgcagtacgatgaacgatgtatccatttctagattcttgtacatcgacttctggataatcatctagcattttagctagagtataccgatgcaggtaataatcactgtcagggtcgtcgagtttccaatctttgccctcaacagtcattcgctggatttcatccattacccaccatccacaccagatataggctgttccacggaacggtagaggatgaatatatggaagttctccgtctggctcaggggctactcttttagtaaaaacaacagcaatgcctttagttgcagttccattattatagtctggagcagaaaccgttacttcacaattaagtgtgtagctagtttccgccgattcagttaaggtaattgttttacctgtttgaccggaaataacagcagaaccacgtttccaaacataagcaatgcttgctcctgctggcgccccagcaacgttagctgtaactacttgggattggccaatttctttagaaacagaagttgggctcaaagttaaagtaatcgcaggcatggttttgttcttaactgtcagagtagtttctgctgaagctgtttcaggggagccactagctggagtaacagtagcaactactttaatagtcttactgcctgcaggacccgcagcaacataattcatggctgcggtaacagaagattgttttacgccgtttacggtccacacaaatgattctgtgcctgcagccgcggctccagaagttgttgcagtaaaattggttgttgctccaatgactgccgaagcagccaaaggagcaatagatacgctataagccataggtgttccttattttaaagttacaaatgaagaattacgtgtttcacgaatcataacagacccgtttcttttgatgtaatagattaaactaaacagtgtctggtgtgctgatgggtgttcaaacgacgttggccgagatttccaatctgggttatctttaatccattggtaaatccaccatggaagggtgatatatcctgggttcttacctaacaactgcatgtttggactaaagttttcaggaagctcaatgatttcgtctgttttaataattttaactactttgtccattgctttggaaaattcttcagggtccgtgatactaaccggaatattggtaacttgtccttcatcatcgatatggataatgctatctccaataggagcttcagcataaaatcctttatcattgatagaaggagtttttacttcaaacccagggtcatttactttaggtgtttctttataaaaatctgggtcaacatcatgaattttaacacttgcacttactggagcatcaaacagtagttttgcttcatcagacgcttcatcattgaaaagtgcttttccttcaatttcatcatctgcttggattaaatcagcaattgataaaccatcgttgtcttctggcataggctcatcggccaatttagccagttctttttccaaatcagcaaccatattgtcaaatgagcgggtcttcttcagtttaataccgaaggttttggcatattcgtcgagcttgtctttagcttcttttttatcgagtgcctgaatttctttaatatagtctttatctagcattgggtgtgcctcatgtaatgtataaatatgattgtatttataaactgaggatagtacagtgcacgacatccaagtcaaatttaaagattttagtcatgttcatattgagtgtgatgactcaattttctatgaactcagagactattttagcttcgaagccgatggatacagattcaacccgaaatatcgctatggacattgggatggacgaattcgtctgctagattataatcgtctcttaccgtttggtcttgttggccaaatcagaaaattcgctgaccaattcggatataaggtttatttcgatccagctatattcgagcaagaaactctttcgcgggaggattttgacaattggttatcgacgaaagaaatttattcaggattaactaagattgaacctcactggtatcagaaagatgctgtatatgaaggtctagttaatcggcgtagaattcttaatcttccaacatctgctggtaagtctcttatccaggcattacttgctcgatattatgtagaaaattacgaaggcaaggttcttatcatcgttcctaccacagcgttagttgaccagatgattgatgatttttgtgattatcgtttatttcctcgcaatgctatgctgggtattcgaggtggtactgctcgtgattcgaatgcattagtttatgtatctacctggcagaccgctgttaagcagcctaaagaatggttttctcaattcggcatgatgatgaatgatgaatgccatcttgcaacgggtaagtcaatttcaacaatcattgcgggtctcaccaattgcatgtttaagtacggactgtccggttctcttaaagacggcaaagctaatatcatgcaatatgttggcatgtttggtgaaatcttccgtccagtatcaacttccaaattaatggaagacggacaagtaactgagcttaaaattaatacaatcttcttaagatacccagatgcagccgcaaacgctttaaaaggcaaaacgtatcaagaagaaattaaattcatcaccaatgttaagaaaagaaatcgttggattgctaatcttgctactaaacttgcagcgcgtgacgaaaatgcctttgtgatgtttaaacacgtggctcatggtaaagagctattcgagatgattaaagctgctggtcatgagcatgtctattatgtgtcaggcgaagttaataccgaaacacgtaatgctttaaaggctatggcagaaaacggaaagggaattattatcgtcgcaagttacggtgtattttctaccggtatttctgttaaaaacctgcatcatgtaattttagcccatccagttaaatcgaagattatcgtactccaaactattggtcgtgttcttcgtaagcataaagataaatctttggctacagtgtgggatatttgcgacgacttgggtgtaaagccgaagtcagccaatgctaaaaagaaatacacacatttaaactattgcttaaaacatgcattagagcgtattcaacgatatgctgatgaaaaatttaactacgtaatgaaaacggtaaatctatgattaaatttgaagatatttacgaagccacaattcgtgaggctactatcgataacttcatgagtaaaattaattcttgccagaccttagatggtctggaagaactcgagaagtattacgataagcgctctaaagaaactactcttgctgattctgatgacatcattgtgcgggatgctttggcggggcgtagacaggctcttgaagccgattctgaagatgaagatgacgaagacttctaatacaaaaaagccccaaccgaaaggaaggggcaaagccaattggctacatcaacactagactaaattaaaagctgcgtttcttgtaattgctcttctgtgtcttcagtgacaggcaattcaatcgcataattatagcaagctccgggatgaaccgggcctttgtctgtgtggacaaccaatgcttcatcgattggtcctttacagacgacacataccgtattcgacatgattgtctccttagtttacaagtttatttattacgcgccagcttcaaactgacgaaggtcaataatgtgcttaatgctaaaacctcgtgacttgatagcatccattgcatcactacagaactccaaaagaattccccaatattgcaatttagtatctacacccaagatttctttatcagcgcttaaaacagttttcatttctgatttttcgtatacatccatgcatacttcaccaccaacctcgccacggccagtgtaataatccaatcgtgctttaagattttgctttttgagggcatctaatcttaacatctcttttcgacaagtcgagtgcttacgcacccatttaccatacagaacggggttattagccgcttcatactgtagtttagtctggtcgataatcaaatcattatccaattcatcctgtaattcttctaatctcattctatctccactctactgtttcttgggaaggactagtcccattatactctactgctagagttagcattactacgcatctgtatgcgtatacgttctagcgtatcagggtcgtctactatagaaaactgcacggtgacaattatagcgttatcgtcatataacggaagcacatcaaccgatagacgattaatcctaggctcataattacgcacggcagagactatattacgctttatcgtatcaccagttaatggagtcatgttttcaaataattcgtttgtgatatcacaaccaaactctgggtcaaatggccgagacccctttcttgtggttattattccaagaaggctatttttaactgatcgagctcctactgtttttgacacatcagtatcccaagcaagtcgcatctctgggtcaaggtcggaatatagtttatcgatattgctcatgacataatcttaaagaattctttaagccccttaattacatgaatgtgagaaattccgcattcacaagtaatgggaactgccaattgaacctgtggcttcaatagcatatttttgatgttaactacatcttcggttgtaatagcagaatataaatcatcgatttctgcatcgtttaaatcattaaagtaaatctgctcatttccaaccacgatataatctatgcattttgatatcatcattggaatgtcggaatcgtcaaaaagattaggatacttaaactttatcttgaatccctttaagtcataccagaggtcttctggaggatcgatttgcgcatgtgtataatttaatggcacaggaattttacgcccacaggtgcaattccaggtcacctcatgattaacctcgcctatactgtgagcccaaagtataactataagtaattccgattcttgtttgtttaacccagtagcattggtgcattctctgagcaatgctttaacgcattcatcgattgtaccgtttttcttcgctgcaattaaattagcgtattcttctagtgtaaaagctcggcactggatattcttgccatttattcttgtttcaaatttatatgtgatgttcatatccactcctcttattcaattatttataaatagtataaagaggattaccttatggccaacatagttagatgcgaattaccagatggtgtccaacgttttaagccatttaccgtagaagattatagagaccttttattggttagaaacgacatgaacaccaagtctgaagaagaccaaaaacagcttatagcagaattaatggatgattattttcatgaccatcctgtcgagtatcgtccttatatatttcttaaagtatttttgtcaagtattggtaaaactaaaataccagtcagaatgaagtgcccaaaatgcggaaaatacaagcagtatctttttaatcttaatcagcctccgttgacaaatccgaaagtagaggttgcaggattaacgcttaagttcaaaaaacctatagaaataattgatgatacaggtaaaatgattttagacaacattatatctgtgaaggattcatctggggaataccagtggaatgaattaagcgatagtaataaattgacagttatcgatgctatagatgttgaaaccttggaaaagattttatcgcagatgaagccgtttaactttgagctaaagacgtcatgctgtgataccacgacagtattaaaatatgataacattgttgatatctttaagctattgctacatcctgacgagattttcacattttaccaaattaaccatagattggtttctcaaggtaaatatgacttgaactctataatgaagatgctgcctattgagcgtggcataaccttatcgcttattgaaaaggaccttaaatcatgacaacacaaagattaggatatcctaatataagcataaaattatattctggatatgatgcatggctagctaatagatttgttgaattagctgctacatttattacattaacaatgagagattcattacgcgggactaatgaaggattgcttcaattttatgacgcaaaaaacatgcacacgcgtatgaatggcgatgaactagttcaaatatctgttgcaaacagtaacacatcgagaacacaaacccgaatttatgggattaaacactttacagttggtgttgatgataaaggtgatagcattattactcttcagcttggaacgctgcatgacataatgaatctcaagttcagcagagcgttttttagttctgcatatgaaactataaaagaaatgataggtgcaatgtatgttgaccaaccactgattgctcctcctatcaacggaattaacgcttacgtcccacgggttccctggactagtaccctcaaagattacttacgatatgttagaaatgtaggcatttctacagacaacgaccaatttatttttgcgtgggaagatatcaccggaattaacatgatggattatgaatcaatgatatcccaggatccaaatgtattcatgttcggggctcctcaaacaataggtcagtttgctgcgggattaaaatatccattagcatgggattttgaatggcttgttaaatcaaatagatataatagaaatcccatgaaaaatgcaacattttatgcacactcatttgttgacaaagatgttacccgaattattaatggagaaggccaaaacagcgtattcattaataggtcaggaggatattctgacatgatttttaggaatggctatgaagaagcactacgcatttctacgatggctcaatacgacgggtatgctcaaactaaatgttacggtaattttgaactaactcctggtatgaaaatcaattttgttgatttaaaggaccagttcagaactgacttttatatagatgaagttatccatgaaatatcaaataacacatctataactaacttatatatgttcacaaacggctctgcccttgaacctgtagatttgattaaggtgaaaaatgaacttaaacgtgattcttcctattaagaaaatagtaataaacgaaaagacgatatcaattccaaaacttggattaaagcaccataatctgatgaaagatgttaagggtccagatgaaaacatgaatcttcttttggattcaatttgtccaggattaacagcagccgaatctgatattgttgtattacatttattagcatttaacaacagaataaaagaaacggttgttaaagatgattttacctacgatttgaataaggtttacatttgccagcgattaactcaaaggttagatggtaaagaattcaaattcagagctcctcctcgttattccaaacttggttcagtagattcaattttaagcgaatttcttgaatcagtagatggaaaaccaatggatataaactttatgaagcttccagcttttgtaacaaagtgggctgatgacttagtaaacactatagccattgatggacctgaaggaccaatcaaaggcatgcttaacgtaatggaaatatttgaatgactaagaaatcagaaatgaattcaatgcgtagaagagttattgctgactcggctccacagaaaaaggctgagtctcaagctgatgctcaaattaatacgctagaagatattggtcgtcgtttagacgaccaacaagcatctactgatttaatttcggatgtaatagaaactaaatcaaacgaaattatcaaatcagtagaagatgtttcagctggtgtcgaattgaccgcagaagcttctgagcgcacaactgatgcagtatcaaaacttaatgatactgcatcattgattaatgataagctcacgaagcttgctgatttgttatctaaaaagcatgatgttcaacaagatgtccaaaaaactggtactggaacatcattagaaacgataacagaacaagtcccggatgctcctactcagcagccattggaggaattacttgaaaggcttattcctcctcaggatgacagaagacctgatgcagatttctttcctaacacagaagagcaagaggaaaaagctgagcctaaaaaggaaactgaagataagaataaaaagtttcttgacctaaaatttggagaattaattaaaatcgttaaatctggttttggaaaaactatttcattaacagataaaattagcagtatgctgtttagttatactgttagcgctttggcccaaatggcgaaaactgccgccatggttttgggtgtgataatgcttatagatttaattaaagttcattttaattattggactaaactgttcgaaaagaactttgttgaatttaacaagcaagccaaagaatggggtccgctattaactgcaataagcgagatgtcgaatgaaatagtaaaatcgttcgtcaaaggagattggggtggattagcaaaagccattggctcgggtttggttgatgtaattgataagctcggagaaaccattatgctcggaatgagtaagcttcttgctggaatgttacgcgcattaggattcaatgattcggccgataacattgaaggcgctgctttagacagatttcaaactgttactggggcagagcttgatgaagaagatgctaaaatgagagcaaaatatgttgatcgtcaagaaagagaatatgacgaacaacctgaatggaaaagaaaactttctgctaagttccaaaaattcaccggtcagattgatgacgatgaatataacaaactgctgagcggagagaaaaagcagtcagcgtatgcagacttgccagaagatgaacgcctcaaaatcatcacagctcgtaataatgctgaggcagaactcaagcgtacaaaagcatatgttgaaaaaactgacgcatctgattccactcgattagactctgctaaggatgcagtacaaagcacaaccaccagatataaagaattagagaaattatctccagaagttgcaaaagatttaaaggttgaattagaccaattgcaaaagcttcttgattctaaaatatcagaacctgctccaactgccgaagctatacctgcagcagaacaacctgaggttaaacagtctgcttctattaaagccgccgcggatagtcgtgaagctgctcgtacacgtgaatctaatacacagtcacaacctatccaggttaatactgctgtaaataagaatagcacacatgtttatagaatgcctccacagacttcaacagctgctcctggaatgcaaggcgctatgaaaacctcttaaggaaaaacaatgatttttgaagaactggccgatggccttgaaaacatcaaaaaatcaggaactcgaatttcccaaggtaaatctaaactgacgaatgcgccaaccactaaggtggcgcagttcccagctgaacgttcagctgggaatgattccgcccaagatatgagagtacatgacttatatcgcaatgggttattattcacagcatatgattttaaaggaagaactactcctgatttgcgttcatttagacgagatgtaatgttatcgtctgtattcgattcaccaatgtcagcactggctaattcatcaagttctactacaagtactgcgccggtagctaatattctattaccacggtctaagtcagacgttgattcggttagccataaatttaatgatgttggtgattctcttgttacgcgcggcggcggtactgctactggtgtattaagcaacgtcgcttctacttctgtgtttgggtcgatagagtctttaacacaaggattaatggctgataatggtgaacagatttataacaccgctcgtagtatgtatgccggacctgataatagaacgaaagtgtttacttgggatttaactcctaggtctgcagatgacctcatacaaattattcgcatctatgaaatttttaattattattcttacggtgtgacggggaattcatcatatgcaaaagaagttaaagctgctattgatgaatggtataaaggaacacttaaatcggcagcaccggatggagctaaagtagaaaacacagtatttgagcaaataacatcgtttttaagcaatgttattgtagtttctaacccaacgatttggactgttcgcaattttggatattctacatcaatggatggtagagaggatatatttggtccatgccaaattcagagcatccgctttgataaaacaccgaacggccattttaatgggttagcaattgctcctaaccttccaagcacatttacgcttgaaattactatgcgtgaaatacttactcttaatagaggaaacgtttatatcggaggtattgaataatgtttactctcgaagaatttaagagtcaagctgctgatatcgatttccagagaactaacatgttctctgttgtattcgctactgtaccctctagtaaaacccaggctcttctaaacgactttggtggagagctgtataataatatgggtttagatggaaattggcttggattgacaccaggtgaattcaatcagggtataacaactatagtgacacaaggaactcgacaagttgttcgtaaatcaggtgtgaatacatttatgattggcgcaatgactcaacgcgtggtgcagtcattattaggagaatttacggtaggtacttatctgctcgatttctttaatatggcatttccaacagcaggattgatggtttattctgctaaaataccagagaacagattatcatatgaaatggataagttccataacgctcctaatataaaaatcacaggaagagatatggaaccgttggttctttcgtttaggatggacccagaagcaagcaactatagagcaatgcaagattgggtaaatgcagttgaagacccggtgactggtctgcgaggattgccacaagacgtagaatgtgatatccaagttaaccttcatgctagaaatggattaccacatactgtatgcttgttctcaggggctatgcctgtagcgtgtggagctcccgaatttacatatgatggagaaaacacgatagcagtgtttgatgtcacgtttgcttaccgtagcatgcaaacaggttcggttggaaaacaagctgctatggattggttggaagataaggctattcagaaaattgagacgattaatccaaatcagggcttgagtgcgtctgcttcaagattgtctcgtttaggcggggctggtggtggaatttctaatatcactactacgacaagtagaataatttaggggccgtaaggcccctttgttttatgcaatgcagccaataaaccctggctcagtgcgaagaagtttcatttcgtctgtggtccaaactactttaacaggaatgataccttctgcctttccattaagaacggcttctacaaacgatggctctgttggcttacggaagatatcttgaataagaaccgtcggagtaccttcgttaaacccttcaagcatgataagcacttcttcattaaacttctctgcgtctttaacatcagcagaccattcaataccgttaaagcggaatacatgtttcatatcaatttcctcattggtttgtgtaagtctatagtatcacgtccttgtgataagtaaacaactttatgcaaatttttctgggataccatccaggttgatagcaccagccagtagctccatggtacgtgtgtagctaaccttatctgtagaacggtctggagagaaataaatctcgtttaaaaagcttttgaacttgctttcttcaagaggttccactttgccttgttccatcaagatgtcaccatcatagagatgaacagattcatcgatttgctctggcggaactaccgtcatttctaccatgaatgtcttgttattcgctacaccaactccatttctaaaaggagttccccacactttgttgactttcattgccaacccgcgaggaagaataacttcagcctcatggctgaagtttgacaagacacctgggataactaccttaattttatcagcgccataaataatgaacccaaacttaaactcattgctactagcaacttcttcgcctctatcaactctttccaagttgtctgttccaataacagaagatactgcatcaacagttgtttcttggttttctaaatcagaactaggagcatctggcattaatgaatcactagcatttgaataagcaccaaatataactggacttaacgaagtagaaacaaagttctggaaatagaacattttagactcaatgttatctttaaactcttcgtattttccgcgctgaccacgatacaaaagagtgcccggttcaagacgcaaacctttttcaaaggcagaatcgagcggacgaattttcttgtcaataattggatcgcttaagctttccataccaataagataattattaacagatgaataaccagaaccgcagtaatggcgtattgcatctctttcttcttcgcttaaacgatattgcatttcacggttatatttaattgctttggatatagaatcgccaacaactggcacataagcagatatcatataattgacaagattttggtattgacgtaaagctccgaaatcgtcagctggaggcatatcaaatccacgagtagctacttcaacgattttacgcattgtgtcaatagatgcaggatttttagcttgagcaataacgtcagcaacgtctgaaactcgttgttcaatgagtttcattttgtctgaatctgaaggaatgaaaaccttccagtcgtcatgcattctcgacatttggcctacaaataatctcttaactgcatcaccaaaactacttccatatccgccacgaacacgatagtgcttgatatcatcaacatacaaaggaattgatttttctgacccggatttaatatccttttggaggtctaccgtatcgccttctgcgttcagtactggagtgttagtagttaattcgtaccagcgttcacgtttattttctggccaatcttcatcaacatatgaaacaaatttgccgtactgtgctcggattaaatcttttcgagacactttcattttactcattacagcgagttcagatttcttgtcttctttttcgccaatggaattagccaatgcttcggctttggtaacgttttcgccggtttctttagacacataaacttcgcctactttggaatctactttggtgtaaagttcttctgaaatttcaggaattccttcaatctcttcaagtttcttacctttacgaaccataatagaataagcatacttacctttgtagtaagccatatctttcattagattgaaacgaccgccggtgcgagtagtaatcaaccgagcaagaatgcgttgaatggctttatcctgtccttgcattttcttcggattaaagcggaacattaccgcatcagctttaatttgcttaactactttgttgacggtctcaaaaatggtattgatagcaccaatcgggtcttggcctaaaccacctttaagcgcaccgatgttacctttttcggatacagagaaaacatagacctggatgaatttatcacccatcttgatgttcttaactgcatcaccttgacctgacccttgtactaaccgaatcattaaattgttattacccggcaccttaatcaaaaagacctgtggtaccttaagttttggcttaacgttctcgacaggatagattttactattctcttcatcgaaaacttcatttaaaagttccatgacatatcctcgtttgtttattctatttatacgaaaaaaggcccgaaggccttaattaattattgttactgtacgccaaacttgtagtccatttacagactcatactcttcaatgttttctttgaagtttcttaatgtgttaatgttattaaactcaagaacttctgtgtgaacagaaataccaccacgtccgtcaagagatttagcaatcacttcgtataaaactttcattttattcctgttgcctcagtaaagttaacaccaaacgcggcttcgaatgtattagccacttctttatcatatctacgctgtttaatgataggtaagaataaccctactgtaccatcatcacggccttcagcagttacccaaccattgcattcaagttcccagatagttcctggaagagaatctctgtttttccatagatgagtgcgatcaagttcatgtaattcttcgggcttatctttaagaccagagcctgcattaactcgaatacgaccacattctgatacgaacattaacccacccattttaccgggttgtttcctatgctcatatgaaccaacacacttcaaatcgacagtgataacctctttaaatttaacgaggttcttagaacgcttatcttcccaataagcaccgatattcttaaggataataccttcgagaccttggtctacgtatgttttgtagatggctctagcttcatggatgttatgtacgacgtggttttcaattagaataaccttgtcatagcctttgctcatcatttccaacgcacggaaacgtacatcataagcaaatccaggaactttaccttcagaatatactacatcaagcggaacataatcccaaacttggaatctcataccttccgcttcttcagcagagattgttcctttaatggccttattagccaatccgtttgattccgtgcgagccgtctgttggaattccttagctttacttaactcaggaagctcaggctctttaaacatgtcaaacaggtcgtttgtttcttctttcacttcgacatgatacaccaactcgccatcaatcatcacaccattaggatggcgttctcgggcttctttggtcatctcgataagttgacgcttaagtttatctagacccaggtattcattaccggaacgagtaagaagagttacatcatctaaatcatctccgcggatttcagcgaagcaccgggctccatcggctttaagctgagcaaatgcagggaacttaatatatgatagcgctttctcagaataagctgatgctaacatctgtggcatctcaggaattaacttcttccataccttattagcaatagaacctgaagcgccgcaacgcatatccttaagaagtacacggactagtacactagcatcaccctcgttcatcttagagagcaaatctactagcccctggattgccatattaccagtaagtactcgtgctgccagaatgtcttggaggtaatctagaccatctgaaaacgtctttgaaggaacatttggatatttaacgggagtatattctggaactttcttaataaagaatttaaaccgcccggaatacgccagcagataagctcgctttaaatcagcgttatctttattgtcaatgagaatttgggttttggctttagaacccttagcatcttcaattgctttgatgatatcaaaaatcattattcacctaattcttttgaaagttcgcttacgctacgatgataagttaatccatcgatataaacaaacccgttattgatgcattcattccaaatcgggcacgactttgcttcacgccaaattggattccaacgataaaactgattaacatgaccataatcacatgataaccagcgtttacccaccttagtatgaactacaaacatattttcctcctagggtatggctattataccatacccagattgttagcaattaatttggttgttatcacatgtaatacgaccgttattccaccagtcgtttccaggaggaacgtgcgaaccaggtctaaacggaatgataggttgtttccaccaatctcctggaacttgtcgtggaggccaattaaaaggatgttgctctttacgaatttggtctttgatagcttcttcccacaatccagaaagagacttctgcggtttcttaacggatttcagagattccaggcaagttacaatttgatgccaatcttcaaccataattccaggggcagtcactgaaccttctcgctcaccacgaggcatataaaacacacgagtttcagtgtcttcaaatactttgctggccgcagcaatatgtttaggcaaatcatctacataacagacgatgcgatcaccgtattttactttagccttttccagtaaagcatctttagattcatcataatcgcagaccatgatttctgtaaatgcatcagggaacaaagcattcagattgaaacgacgattaaggttagcatctactgaattaccaagagccgtgatagcgacaaaatcgtatttttctttgagcttattaactgtagctaaagcatcagcatacggagcaagataacgaataaaatcgctgttgttgtacttcagaagcagcttaacagctagttcttcttcacaatcaaacagctcagcgggtttaatgaatttttcagtagtcatcatatcaaggatatgctctaccggaaggttatatttttgggcaaagtaaggcagaccactttgccacttaacgatgattccatcaacatcggttgcgattacaggttttgacattcggggaaattcctcaatgcttgtttaaatttggcaacgctatttgcggcaccggtgaaattgaaccagattaaccctggagtgtccgagggttctatatcaattaattctatattataatactcagcagtctttagcatttccctggtgatacgtcgggcaaccatatgaccgaaatgaggattaatagacatcgtcgttagcagcccttaactgagtaattggataaagctcagattccgcatgaattgaacgattgccatcaacccaattaacttcataccacggttcaactgagtaggctttaatggatggagccgtatcacatacaactccaggaattccatttgctaatcttactgtactaaagatatgatatttcatgcatcaagtctcactgcccattcgggcaattcaaagaaatccggagcatcaatttcatactcaactgtatgttgtttaacatcagctgacatgatatcaaccattgggtggtttttcaaactgcaagaaaaaataccagctttagatttaggcacggatacaatcatgttgatttcctcaaaatttagttatgaatttttctttcggcattttagcatttgagccatcattgtcagaatacccaattggcatagttgcattaatgaattcaattttagcatttataacattaatgctcagagaatctacgccatcaaccatacgaaattcaggagggcaatacttatcaatgtatgctttcacgccatttttattagcaggtgtaccatcgcgagtatcgctgataatggtttcaacctttttctttcgtgaatcatagaaagctgatacaatcatttcaatttcctcttaaaacggacgaatattaacgtgaactacagggacagcaaaaggttgcatgattacaacttttgtgtctttagttgcattcaggcgttgtacttttgcaagattaacagcttcttcctttgttaatccgccattgtaggtatcatttcctttatttgatgtccaaacaccccaatcattgcttccatcatcggtcttcggttcaggttcaggttctttgtcggtggtttcttcaaaataatgttgaaattcttgattagtaagaatacaccacatgtgagaaaagcgaacttcatctacactaacgcgtttgtattccccatctggcttaatgatttcaaattcaactaatccagtattttccgcatatttaaaggttctggtaattttaatcggattattaccgatttgctcaaaaacacccttgataagagctcctggagacaagattggagtctttttaagcttatagaatttacctttttccattatcatttcctcaatagtgggggccgaagccccgagttagttaaaacttgatttcgtttgaaacgatatcccagattgcttcacgttgttcttcggttgttttacgaccgaggatgtggcgcagataaattttaacaagcagctgacgatttgtgttccaagacggatgtgaagataaatcgcgtttacgaacttcatcatgaaatccaactttgatttctgaaccgttaaactgaatgtccagagtagggccgttttcaaagctgaagaatacgtagttatcttcccagtacatatcaatttgagctactgtaccattgttgtgttcccaaagcaaagtagtagatacgtcccaagcattgttctgtacatatttgcggttgaagttagtgaagttcatttttattctccgttgtatctgtttgggtggtacaggtctatagtaaccttgttgaacctagaagtaaacaacttttttcattctgcggaaaataaaaaagggactcccgaaggagtccctgaacttatgctttcggcttaccaaaacgagaagcatcatcgcgaagaaccgcacgagctcgacgcatgattttctcaaccgtctgattgatacgcttgttcgacccacgcttgtagccagcgcgtttagaggtaccaacaacttcttttactgcagtttttgctttagcttgtttagccattttatcatcttccattttggagaaatacatgggagcacgttcttccgaggttcaacttctttcgacagttctttcggttgtagctcccgcaagccctcaaagggtacgtttaaactcttatctgttgcacaccgttagcttaaaggttccgggtccgatttctcggggataagatatacaccgatggatgtataggccttgaggcgtactcccaattggccatcgcctcggggtagcatgcacttgccgtttattttctagctgcactttggtagcaaatcaccgatggtttcggatgttttacgtggggataaccaacaacgtccacatcatacgttacccatgcgtacacatggtgggcgtacaaattacttcagcgttaccacaaagtggcgaacagctttgcgagcagcagaaccaagatgcttagcatacttcagttcatccatcgcttctaaagtatcacgaaattcagcttgagctgggttcagatgtttaaaacctttcagaacttccagagcttctgcgtagatatcaatagaagcaccgtaattttcgtgaccggaattccatgcattacgttggagttccagggctttagtaagttgtttgttcattgaaacattcctcaaatgaggttaaaatttggtggacggtaaccgaggtttagctcgggcatccaccgcgtagaattgctcgggtaactaattgtccgacgcccaattcatattattatttatacacacaagctagggacttataatgacaagtcacaaacttctgtttaatttctttaggtttcttcacacctgccgctaccaatggatgcggtacatttctaatattaccaacaggcagtggagtcaaatcaccgacttcaacaaaacctttcggtacatcatcaccgatagaatagatttcacacatatcgggaagttggccttgttcttcttttccgagaataataccggaaggagaaacaatttcatcacctttttgtgcaggttcagacacgagaattacatactcgcctagagctttaattggaagttccatgtgttacctttattgtttgaccatgtagttatattaacatggtcagtttaaagcaaattacttaccgatcatctgcagcagatgctcaactttcataccatttaccgagataagtttatcaaaggtaaatgagcgccaaccttctttctcggtatcatataccggaagtgaagtagtgctttctgctcgggcagatttagtagtactttctaccaaatcagatggaataatatctttatcacgagtacagcgcagagtacgaatagtaccatcagctttttcaaacacaatctgggattcacccatgctcagcacagctttaagtgtttcacggatatggatgttttgttcagtagtcagtttcattttgatgtctctttaatagttttgataattacagatttgcgcttggataattcttttaataatcgaactgcttgatcttcaaatttaaatgttgctaatggtttccatttaaaccaatgccggcgttctactgagtatgatataacaacatcaccacttagattaagtttattaatttcaacaattctaagtttcattattcaattccacagaattctttaatgttataccagttcaacttatccaaattgcgttttggaacattgaacacctcaattccagccgaacgaagaatatcgtcccagccaggttcgttcttgtcgtatgtttcgcagtatactaattttttaataccagactgagcgatggcttttgcacaatctggacatggagacagtgtgacatacattgttgctccatcaatactactgccgttccgggcagcaaaaagaatagcattaagctcagcatggatttcattgactttagaccatgcagagtgggctgctcgatgttctttgagcaatccgacttttttgacttggaatccgtcttgacgcaatcctgtagatttgtaaggaatttcaccaatccaaccttgttctgctgcatggtcacaacagttcacaccaccagaaggtgaaccgttatagccagtagaaataattcgtccgttcttttcaattactgcgccgactttccacgagcagcattttgactcttgagatacgagatacgcaatttgtagtaccgtcgacgctttcatttaaatcaccagataagttgtgttatttgttttaaccaattttaactcgtcggtaggagaagcaaaactctctactcgagaagtacgaatgcctgtaccatctggaaacggatgatttcctcgttcaataacatcggaaaagacatagccataaagaggttggccttccttaacatcaacgttactgtacaaaatagcatcatattcttcgcgtggaattgaccaaacgccttggtcagaaccaataacggcattaattagacgaataccatttgggctgatttctgctttaatgccacgagcatgttcaattaaaagagcttctaccgcttcacgtaaagtcattagatatgtcctaaaatgttagtcatttcaacttggcctgttccggttaaagccaattgagtgtgttgattgctctttccattattaactgtaatgatataagcatcaacatagttaaaggatgactctcgtcggagagtcactttacttccaggaacccggtttgctacttcctgtgcgaagattttaaccttcgaaataaattcatcatgtgaaaatttagcgtcagacaacataagtctcaacctgttgggtttcaaaattagcaataattccaacgataaaccaatcgtgttcaccttcgccacaagaaattttaacttcagatgaaccgcctgaccggtcaatagaaaatttaataacttcgccgtttggaataagtgcattcattgcagataaaaactctgcatgcattttggctacttcagatggagtaaactcatctgttaaatgattagcaacaacttgcgtaaatgatacttttactacttcggaatactttggaaacattatactttcctctaaaaatcaccgtgggctacttgccagcattcaacaccaatacgacgccacatttcaactacctgcgccctgtcatctactgcaagttttacattataacgatcagcaattcggtcccagaagatttcttcttttaccacatcgtctttgcgtgaatcgccttgcttacgttggaagtgttcgcctgtttcgccaacatggtccaacaaccatttcttcgtaatgcgttgataaacagtagggtcttctttagtaccagactctctgccggaaacagtaagaattttatatcctttgttacgaagcattttaagaaattcaattaccatttcctttggatggtctttaccacatttggccaagtcataaggagaacgatgattgttatctgctaacgtgccgtcaaggtcaaagataactgcttttggcagtgattcgtctggaatgtacaaatcatatgggtgcatcttagaatagaagctacgaagcacttcaataggaactgcattcgcgccacgatagaggttacgattaagcaattcagtccaaggaacgtcaaagcgtttaatttcccacttgacaccatcaatttcatatgccaactcttgccacttcttgatagtcgttggattaaggttagtatcagcaatgatgacacctttagtggtttccatctcgagtagagtcttcgccatagaaaactgacatacagatactgacttctcacgaagcttagaatatttgtaatcattacgtttatcaaggccaaagatgccttcacgcaaatcatcacgagacaaaacataccaacctggattagatgctacatattcattagcccaggttgttttgccagagcctggagctccttgtgtcaaaaccaattttttcattatacatccttaagattgtcaataaaatcatgaagagccttagacttttcaccccaattagcacgatatttttctttaattgctcgcaatggcttattcattgacagtatatcatttttgtcataattttcagctgcgcgtccaaacacgatgcacgccaattcattttcagcaattaaccctttaagtgtttcatactgttctcggttcattataataccattttagaaagattgcgatgcgccaatgagcgacgctttccatgtttcttcaaaaaattgttaacttcatcttgctctacaccgccactttctacaaattggagtgccttaccaaattcaattgaggcatcttccaattcagaaattgcttccttcagtgcctctttacgctgaacaaactccaaaaaatcgggatacataaattctgccatgaatagtttaaaccacacatcaaacgaaattcgtgtttggtcattaagctcaaacactctttcttttaaagcgccaggtacactaacacggactgtataaacatatccattagaaatattttctggtacagcaatagctttcttaacaagaggagttaactgacacgacccaacagctagcatattcctaagttgtgtctttttaatcgataaaagatgtgatgcgtcttttacgaagtaagaatgaaggtgtgacggttccataatattttcctcttgtttagtttacttaacgcaacgaggttctttaagttcagaacgataataacatatcattccattagcatctttagtataacgtaaaatgtcattcatccagatacgatactcttgagactcttcaaatggcatacctacccaggctttaccgtcaattacttttacttcccaatgtccttcccatttttgaattgggtctggccactcaggatgtaaaaccgggacatccggtgcactagaagagcatccaacaagtaagctgataatacccatggctaatagacttcgtttcatctggtagcctcctggatatcttctgcaaacttattgaagcttgcattaatctgtttttcaactaacccaggtttagctgcgactacatttccacgcttagcatctttattcattttagcgttggaagtatcacgcgcagctcgattttcctgatagcctttatatgttgtctgtagattttttatagaaacaccaatgttttctatttcttttgcttgtcgatcagattcatcttggacgactttgaggtcagctttaagattttctacccgccacgaaagatatttcaatccaccggcggataacgctaacacaccaatcaacaaccaagttgtgtttattttgagcatagtttaaggataacctctacgatatcatcacgggataatcccgaaatgaggatgtgacgatcagaactttctgaaggagaacacttgaagcaagcttctacatattctgccatctcagaataattcagctcacgatgcataataccaagacgatgcttgccataaatcgggtcaacgattacatagcatttgcatccgttagcatgaacgtttggttgggtgatgttcttgaacacctctgcaccatacttcgtgagatgattatctaggaaatcaatcatttcatctacggcttcaggaagggcttcggcacgctgctcgttcacacgattagtgtactctttttgcttcttgcgagcagcttccttgcgagccatatgggtacgtagatcagtgacgaatcccactttcttggtaccattccacacaaaaatcccgtcagaatgagtaccgtatttgttaacaaccatatctaaagtaattgcttgcatatccatttcattatcctcatcagttggtgtaagtctatagtatcacgccctgatgaggatgtaaacaactattcttcagaaatttcaatttctttttcgtactcttttggaacatatcctgcccagtacttcaagaacactctttcgaggtctttaagcagtttatctacatctacagttccttcgtacatgttcatgataacaccaaacaaatggcgctgattaaccgtggctttctgcgcagcaatagcataatctttacgagcacgacctctgtattcatcgtagaacgactgacatagctcaagtgactttcctaggtaatctagataagcttgctcaaatgcagaaattttcttaattgcgtattcatctccagcaaaaagagaacgcaaatcgtcggaatttgcagatacgacagacgcaaacagtctttcatttgacgttattgagtctttagtgtgatgaagagcagaataccattcggttttaaccttaaatctctgcccagtgtttagaactgcaatgtacccttctacgccttcaagttcacgaacaccttcaacccaagttgtgggatcagaaattccgtaagcattaattaaataaggacgaatcttagcattagcgtacaaatcatcatatttaatatactcaccagttgtgttattacggacgtttaacacaaacagctgtggctcctgatatgctaaaacaacacgattattaggtgaaacaaattccatatttaccgtataaccatctagcgctagctcaagaataacctgatgaagcgaagaatattcttcactgttaagcaaagctgaagcttgtcttgcctggtcactgtaaagagatgtttttgacttaaggtatagatacccatcatcgacataagatgatactagagagccatcagccttatccataatgtattctacatcgctaatatcaattcccatcgtcattgggttttcattcaagttaaagaatttttccattggacgagaagcaattcgaattggagtatcaccatccatttcaaacatgatgccccggcattcgagagcatcgggttttaaccactcgctatagcttgcatagtgatatgaaaacactctgaacttaccatccataggaccggtaaaatctttataaaagaattttgcaacttctgagctttcacacagattcattaaatttttatatagctctaacatttctttaccttatgttgtgtgttccatggaggattgaacttcttaatcagaagtggttcttccaagtccatagtggatattgacatctcgccaagttcattattaatcgaaagattaaaacactgacgagcatagaactctacttttttgccagccattagcgcttcaaaaatcttggcagatttagctgaatcagaggtttggtctttccgattaatagcagttctataataatttatacgtttacgaagatttttagtcttaccaatgtaaactagttcatcatcaactgcgatggcataaactacattcaacttgtttgctatcaaaattggtttgatggtaaaatctggttctaactcaagttgaacatattttataaaagaaaactcgttagcaatatcattcataataaagaggggccgaagcccctttccttataagtactttttaaatccaattagaacatcatcagtgacatcattgtcaatctgtgctaccagataagaacttatctcaacttcctgaggagcagattggactgcgtcagagttaagatattcgcgaatccaaggaataggatgtcgagttggtgcatcagtgattgggcacggcagcccacagctacgcatgcgagatacagtcagatagtcaatgaagtcatgaagaattttaacgttcagacccggaagaccaccgttgcggaaaagatggatagcccaatctttttcttggcggttaacttccatgaagattttaattgcttcttgttcacactctttagcaatctcaacccattcttcgccatcagtgccagtttgaagttgacgcagaatgtactgtgtgcccttcagatgaagttgttcatcacgagcaatgaacttcattattttagcattaccttccatgatttccatgttcttgtggaaattgaatgtaccgtatgttcgattgagctcgctaattctcaacccgttctcttatgaactgctgcatgttaccatgcagtccagactatatcacaatccctgagggattctccccatttcgagtcgcttgaccctacgtccgaagactagtcgttgaaccttgttttgcaattgtcgccgtgccatcgtttatatgttgatggtgataaatctttcttatcacaatacggacaattcaattgaattctatttggatttaatttacatctgtcattatgttttagataaaatccaggacctttaccaatgtgaccacagaaatcacatgtgatttctttttgtgcaggatgggtcccgttcttaaccatttctaatgtttttgctgatgttcttttcttatggtcttctgataagaaatgatgtgaaccgtcatttacccgttttgattgagtttctgactgcattttaccaccgcaaaatacatgagtaccttcttttatagctgcaatattgcgttctttaacttttgcaatatgcttagcttgttgaaaattatgtatacctaatgcaactctatttaaattagatttacgctgtatttcaccatctaaaagatgaaatgtaccattttctatcttagatttaatagaggcaatatttttagctcgtacttcagggatattaaaaatctggatttctctagattttgcggctttagaagctaattcagaaatttcttcaggagaatatttcattctaagctttatagcatgacaagcctggtaatctttttgagctaaatgtatatcataatgttcctgtatagaaaggcacatcaaattatctaaatcattattttcacggttaccgtctttatgatggatttcgtatgttcttccatcagaatctttaggtataggtccgttagcatctatccaaatttttctatagttcaattgtgcatcctcttaaaagtataatcatatttatattatactaattaaaggtgcaagcaaaaccttggctgctagttttccataaaggactttccagcaattaaaggagttttcgataaacgttaccgtttaaaggcgcattttacgcaaaagatacataaaaacgaatagcttccaatgcgttaataacatgtaagcaaagataaagagatttcattaaatcacgtttagcttctttaatttcgatattatcttgattaaagcagcgatttttggcattttcccatgcgcgagtcttcgctataacatcatcatagtaaacaccaattgactcagcgcgtttcatgattgcttcgtcaagaacgatttcatcaaagattttagctgggtctacatataggttacgcatgatatgcgtgtatgaacggctgtgaatagtttcactgaacgtccaagtctggttccaagtatctaggcttgggtcagaaataagcgcagataaaactgctgctggagctcgtccttgaattgaatcaagaagagactggtacttcaagttatcagtgaagatattacgctggtgttctgggagtttttcaaactgaccacggtccatcataacgttaacttcttcaggacgccaaaagaaactcaattgcttctcaatgagttcctcgaatactttatgacgctgaatatcatagcgtgcaattcctagaccagaaccaaagaacatcggttcggtcatgatatctacttgcttggtattaaaaactgtactcattctatttcctattctgtggtgttaaccatccgtggtctaattataattcccttttattaaagcttacaggccgcgcagtcagcagagtcttgaatcatatcatcgttaccggaaccatcacgggtgttatgatagtaaagagtcttaccgccaaagtaccagaaataaagcaagtcgtccatcattacagacatttcaactttgcctttagggaaattcgccgggtcgtaataagtattagcagagatgctttggtctacaaatttctgcataatcagaacctggttcagataaggcttattaccctgtttcgcgagctgccaggcataatcataaagggaagcattgtgctcaacatttggaacgacttggttgaagcttccttcttttgattctttaactgacaccggtccacgtggtggttcaataccattggtagagtttgatacctggctagacgattcgcatggcataagcgcagataacgttgaatttcggataccgtatcgcttgaggtcttctcgcaggagttcccagtcacagacatagtttggagctgcgagttggtcaattctttcgttgtaccagtcaataggcagttcaccacgtccgtatcgtgtttctttgtaaagcgtgcatggacctttttcgctagcaagtttaacggaggctttgatgagtgcatattgaatacgttccatcatttcgtgagtaatatcattagcatctgcgtatgaagcaaagttgcttgctaaccaagctgcatagttagtaatgccaacacctagtgctcgacggtctttagcttttaacgctttgtctacaggatagtcttggtaatccaaaaggttatccaaagcccttaccattacttctgcgatttcgttaacttcttcttggtcttgccagttgaagttgtcgagtacgaatgctgcgagtgtgcagagcgcgatttcgccatcttcttggccaacatccgaagttggtaacgcaatttcgaggcagaggtttgattgcttaaccgtagccacatcacgaataaaaggaccatattcaccaacgttatctaccatgtacgggtaaattcgagcagtaccagcacgttcagtaaggaacaactcaaacagttcacgagctttaatacgtttctttcttatatctgggttcttttccagttcttcatataatgtacggaacgcttgagcatcacggaagtattctgtgtacagcacgccaagacatacatcgggactaaacagagtgatgtaatcattcttaatcaaacgttcaatcatcaggttattaatctgaacaccataatctaaatgacgaatacggttttcatctacacctttgttgttcttaagtacgaggaggttttcaacttccaagtgccagattggatagtacagtgtcgccgcgccaccacggactccaccttgggagcaggatttaactgctgtttggaagtgtttccagaaaggaataactccagtatgtttgacttcaccgaatccaatttttgaaccttctgcacgaatcatacctgcattaataccaatacctgcacgcttactgatgtattttgtaattgacgcagcagcttcattaattgaattaagactgtcaccgccttcaataaccacacatgaactaaactggcgtgtcggagtacgaacaccagacataattggagttggcaatgaaatctttttagtagaaactgcatcatagaaacgaataacgtttgctaaacgattttcgccatcatcttggtgcaagcacataccgatcaacataaaggcaaactgcggtgtttcatacaattcaccagtgtgacggtcttttacgagatacttctcgataagctgcattgttcctgcgtaagtcatagtgaaatcacgctcatgcttaatataagaatcaagcaaagtaatttcttctgctgaccatttgctcaggatttctttatcatacttatttgcgttaacacaacgagaaatgtggtcaataaaagcaggtggctcaaactgtccataaacacgcttacggatttcaaacatagctgcattagacgccacatattggtaatccggttcatcaatagaaatgctattcgccgctaccttaacgatagtcttttggatatctgcagtgctcatgccatcacgtagatgggatttaataatttcatataactcgtatgggtctactttggttccttcgcacgcccattcgaggactttaatgattttctgcatgtcaaattcttgactaacacctgagctcttaattacttgcataagtcctctaattcaaatgtatctttaaaaagtttattcactacaagagctattatatcaccatggcaaggaagcggtttgcaggtgcatcctaatctcattcctcttaaagtttctaagtgctctcgctttatttctccgttccgaatcttagcaataaaatcgtccttaaacgcagcaatagcatcaggacgattatcgcaatctttaccgacgtaatttccccacattgttccgcgttggatatttacatcgaagtcggaatggtatttattaaccacccgacatatcttcatgttatatcaacttcaaaccaacagattaattgtgttttgcctatagaccattcatatgatttaacaatagacagaaccctttgttcgatcccgtcaaaaactatcttgtcattaacttcaggcaaatcactagagaatgcatcacgcatctcgcctaatattgtttgtcctttacgaacaaatcgaatattcatatcgccattttccccttaattgttgagtgagattcatatccaactaattcaaagtggtgtggacgtgcaaactgctctaaccaacgaacctgagaaccagtctgccatgtttcatacgtatccggaaatgctattttaagttcgcataactctttaggttctcggcggagaatttctttgcattgctcaatgtgattcatgtaaatgtgagtattaccaccagtgaataccaaatgaccaggtttaagattggtcattttagcaataacatgaatcaatgcagcatacgaagcaatgttaaatggaagacccaagaacacatcaacagaacgctgataccactgaaggtctaaatatccattgcgaacgttgaactgatacatcatatgacacggtggcaatgccatcttatccaaatcaaccgggttccaagcagtcacaatctgacgacgatcagttggcaattgcttaatacggtcaataaccaatttcaattggtcaacgcccatgaaatctcgccactgtttgccatacacagggcctagttcaccaccagaatatcccatgtcttttgcctggttttcatagttgtcgtcccagacagttttaccttctagcaatgaaccatgctgaataagacgcaattcatgaacattagtagaaccacgcaagaaccaaatcagctctgcaatgcatgctttccatgcaagacgcttagtagttacagcaggaaatcctttttgtaaatcaaaccgaagctgggtaccaaactttgcgatagtaccggtaccagtacggtcatcagtctcgtatccattttcaaaaatatctttaattaattcttggtattcacgcattaaatttttcctgaagaggtgtaaagaaaagctggtctccacgcttttcaaatcgtccaataatagacactacatcatctttgaccatcacattgccatgtgacattccgatgaacatcttcttataatcacgttcaatttcaataggtatatttccacttcggttatatactgtagttgaaccgttataagtgctaagaccattataactgaaaactagaagatgaataccatgcttaaatggaaatcttttccacctcttttggactttgtcttctgatagctgagtgatatcatagtttgcgctcatagaccacctctgaaatgttagtcacttcatcaatatgataccagtgattttctttagtaatgaatcctgattctggccaagtaggagccaccacaaacgcaataggcagagtgacatcagaattcactctatgactttttctgatgattgtttggataactctatctgcatatggatatgccttctggatgattccggcaccacctatgatagaataattaaggtctctattaaaagtgatagtactgttgtaagaagtatgagcggccataatgccaccacccaagaaaccgataaattctaattcacttacataagcatctgcaaagaagccatttttagcagttgccaacgcacgactcatgtcttgaacaacgattgtcttacgaccaggaagaggtttaggaaaactcataaaagtctttgctccgcaaatcaagatagtatctcgagtacgattagcaaagtttttcatgtcctgggaaatatgtttccatggaagaccatcgcctaaaccaaaagcattttcatttttgccgtctacagtttttgtaggagcaaaggcataaactatttgaatcatttaaacctcaataaaatttagccatataaaaataatcctaatataatgccgctaataaaagcggcagtaacagaaattagcaaaactactaattcagcctcaatcatttcttggccttagcaagtttaaatgcttttttgaattcttcaacatcttcaacaggaatccagaagcctgagccatacccatcttcatagcatgggcagttatcacaataatcattccaatagacggtttcaccacccatagtgaatggagcttccattcggcacagtacttcttcaacacgctctaattcttctgggtttttgtcgcaaatgcagaaattccatttaccacgatattcagaaccaagtttgatgctttgacgttgaagtttcatttttattctccagtagattatggagctatactatcacaagcatagctccttgtaaacaattattcttcaaaatcttccataaagtaatcaatgtcgtcccattccagagattcaagatatgcaataaccttttctctagaaccgcggaggtcaatatttggccaaccaccaccaggtccatgacgcataatcaagtcaaaatcaataccatggtcagtgtcataaaaacgtgtaccatctgcatactccaaatctacacaaataccatctttgttaataataggagttgctacgatatcaatgtttaatttacccatgatgttttcctctactcgttttgtttcgatgtagatatagtatcactcatcaactggcttgtaaacaattttgtgaaaatattttttggagggataaagaaaaagggacccgaaggtccctttatattagaggtcgttcagaatatcattcagatcgtcatcgccaacactgtcaccagcatcgcccatgatatcgtctgtggaacgagaagaggtcggtttggattcaaaatcagacaggtctttgtcaaaggaatccaggtcatcaccaattttatcggcttgagctgctgcttttgccgcggcaccaccaagagctgctgtacccataatctgtttaaatttggcttcgttaacttcaaacgatttaaactgagatggagccacaatttcgctgaggtcagccatattttcggtcaggaatttctgagtttcttcatcattgatgtttgcaatctcggactgaccaaggaatttacattcatcatagttctggaaaccaccgactttcttaactttcatgacgaagtttgcaccttcatacacacaagttacatcaaccggagtttcacccatatcaacatcgatttcaaccatcgcgttgattttgtccataattttctgaccgaaacggaatttaaatactttaccttcgttttctgggttagccgggtctttaataaccaggatgttagaccagaaagaggttttacgtttcagaagcttatattcagccgggttgctgttataagaatcgtttttgctcagatgagcacaaaccgggcaagaatcaaaatcaccgtgggtagaagtacaattttcgatgtaccatttaccagcgtgtttgaaaccgtgattgatcagttttacaaacggcagagagttttcatctttaccaggcaggaagcgaattactgcttgaccattaccagcattatcggtcttcagtttccattcgtttttgtcttcgttagagaaagaagaaccacctttcagaccagccagttgttgttgaagttgagcaggattttttcttttaaacatgagttatttcgccttaatttatttaaacagttgttgttgcaacatgggtccttgcaactggacgatagattaattatatactaatttctttacaagatttgattatgctaataaagagtttcttagcttcagcaccgtcaacgtttaaaagttttttataagcttttaatttagtggagtaattactccaaactaagttatccgttgcagtatcatgtgtatttattatatctaaaaacgagtcaagcatgatgaatgtctcgaaagatataacgtttgactgaagaagtttgaacacataagatgttccgactttctcattatattcaaaaatatcatgaagcttatctacattaactttcttagcaaagtagtaaatattctttacgtcttcagagaatgtatttttgatttgcttcaacttaccgatgtattcacgatagaatatcaacgcgtcagcgtcactgatatcaccaatccaagcgtcttgattagctacaagattgctcatgaatatcagagtcaattcttttagcgtataattctcagcaagtttctcaaagaagtatttgtctctgcgcttttgataagctttatcagagacacgcatgacccaattatacttaacaacatcatatcgaccagcgaagtgttgtttgagcattaaatataaaagataaacgctcttaccgttaacgtatctattattgttttggggcatgcgtagacgaatcataataaaaaatccagactattcgttttgtgtgtttgactaaatgatggacgaagcatattttcttccaatgcttctgacataattttttctatgattgctggaggaatatatctattgaagtttccctcaggaatagaattttcttctaaccactgagttgttgcttcaagataccccattccaagttctgttaccatagattcgatagcaaatccattagcttgcttatctagcagctggttaatggattcggagggggacacatccccctcatctttaagcgaaaatagagtcataagcttctaccacttcatctttttcagtttcaaaacgatcgcgtgtgcctttatggaacagagcaagcagttgattaaacagtttgccttctacgccaagctctttcttggcgcggtctttaatgtctttgttaagctcaagatagctttctgcttttagcttattacctgaggcttccttaatcatatctcgcagagcctgtccgtgtactgcttcatcaaatactacttgctctttttctttcttagccattatattcaccttaaaagttgtttatttctttcattaatttagacagaccggatttaacaaagtagctataaattttaccacgacccggtagttgatagttattataacaatctaaaatgttagcaacaatgtcttcgcggatgtaatcaaaatcgattaacacacggttttccaagaaacgcttatactgttcttcagtaagcaaatctttgatgttttcgccagcatcaagacactcttcaacaaacgtcatttttgtcgaaggagtacgctcgccatcaacatgggtgtaccaaaaatctgaacgaactttaatagaagcaacgttatctttcttgtcacctttaataattttaaccatacaatctaaagcaggagagccggttttagatttcaccaatttcttctgcattggtgaccattgcttaacattaggatacttatgcaattgagtaaagtcaccatctgaagaaacaatcatgactggatggccttcaagactgaactttttggttaatactgcaatactatcatcggcttcagctttatcaatgtcaatgacataataaggcatatactgcttaaattcatcaattacagtacgaagaccttcaaagtaaccttcccagtcccaattagattcttcacgggctttagcacggttctttttataataatatgctacatcccggcgccagtatccgttgattgcattatcaacacaaatgacaatttttgtgtatccatctttcttccacttaaaagcattaaattttaaagtagaaagaataagatgacgaaccataggagtggttagtttatcgccttctttatacgtatgaagaattgtcgccattgcgatttgcgacaagtcaatcagaatgacaccttcttttacttggtcttcttcggcgaataagcaatttaaatcagacatttgaacctcgttcaattagttagtacagccattataaatacttctataatgaagcataaccccataggagactctatgagcgatttactgaaacaacatttccgtgcaacgaacggcttggacgcaggcggaaataaagttataaatgtggcactagctgaccgcaacgttaaaaccgacggcgtctccgtcgagtacgttattcaagaaaacactatccaaaaatatgacccgacgcgtgggtatctcactgattttgctgtgacttatggacgtcgtatctggattgcaaataaagatattccaaaacccgctggagctttcaatcaagcaaactggacttcattgcgtgttgacccgaactggatttataccgtccgtaaaggcgagtttgaaattcaatctggccagttcatcaacgttgactcaaacgctgcaggtaatgctacgctgttgttacctttagcaccggatgaaggcgataccatcgtagttcgtgatattggcgggcgtcctggctataacggaatcttaattaaagcacaagatactggtgcgtctatcgtatttggtgaatcgcgcctgcgtgaggtaagacttacacgtccgtattcacaaattatgcttacgtttagtaatggtgcatggcgtgcaagtttaaccgattttggcgatactgctaaaatggtagttcctaacgggattgttccaacccaggtacagtcgggtgataacgtagttcgtcgttatacttccaactcagagatttttattactctgccgttgttcgctaattcaaacgatatcatcaattttactgaccttgacggtacatcgccaattaaccatatgactgtgcgtacgtttgacccaactatctcaattgggactcctggacaaacagaggttcaagtacgtacttcaggtaatgggtttttggtatatgactcgattgacaaaatctggcgtatttttgaaaatgatttacgcacccgagtaagaataattacttctgacgttactttaatgcctaacgagcatatttctgtatttggcgcagataacaataccgttaaaacaattaacattactttacctactgacgtagctgttggggatactgtcaaaatcgcaatgaattatatgcgtaaaggacagactgtagtaattaaagcttctgatggtgataccatcgcgagtaatttgaatttactgcaatttccaaaacgttcagagtatccacctgatgcagcatgggtgcaatcaagctcgattacctttaacggaaccacgtcatatgttccagtacttgaacttgcttatattgaagaaaaagcaactggaaaaagttattggattgtaactgaatctgaccctaccgtagaacgtgttgatgctaaagacaatactaccagagcacgattaggtgttattgctcttgctacacaggctcaagctaatgcggagtcaaacccagaaaaagaattagcaattacgccagaaaccttaaacggacgtcgttctactgaaacccaaactggtatagcaagaattgcaacttccagcgaagttaatcagtcaacaactgcttcttacttggataatgtaatcgttactcctaaaaagcttaacgaaagagctgctactgaaacccgtagaggtttagcagagatcgcgactaatgctaaaatggacgcaggtgaagacgattttacaattgttactcctaagaagttgctttatcgtactacatcggattcgcggttaggtgttattcaattagtaaaaattggcggtgaccctaacacaactgctgatcgttcttctgctggcaccggtatattcgatcattctgattacaaaaatgcagttactccaaaaactcttcgtgagtataaagctactgtaaatcagtcaggaatagtttggttagcaactgatagcgaagttagaaacggaactccggcttcttcaaatattcctacagtcgttacaccagaagctttgcataaaaaagttgctactgacggagcaatcggattaatccaaatagctacacagacggaagttaatgctggcggcgtgactaataaagcagttacacctaaaacattgaatgaccgtacagcaactaacgatcgtactggtattgctcgcttcgcgacacctggtgcacagggtgaatttgaagctggtacttcaagtatagtaatggtaaaccctaaattattatttgataaatttgctaataccgatcgtatccaagttaatactagttctggcttaactattactgggaacctctgggaccattataccatcaacatacaggaagcaagtacttctcaaagaggtacaaccactcttgctactgctgctgaggttagaaccggcaccgacgccaagaaaatagttactgctgccacgctacatgctaaaacagcaactgaaggagctatcggtcttgctcagtatgctacacaggcacaagttgatgcaggcacattaagtgatagaattgttcctcctgcttacttgaaacaaactattcaggtaacagagtcatggcaagctacagacagcgttagagggaccgtcaggctatccacaggcgatggaacgtggaaaggtaatgataccgatggctcaactcttccggataacgggtatgcctctaagggcgtcgcagtgtctccatatgaattgaacctcacgttgaaacattacttacctcgtcttggtaaagcctatgacaccggaatgctaggtggtcaaaccccagacaaatatgctcgtcgcgatatagcgcagactatttctggagcttggtcatttagtcaggacacttcatttagcaataatatttctgtccagaatattatatatgctaatggcggtgaagttaaaatttctccaactgctgacaccggaaacgtgcatgttcgttttcaaaatagagatggaagcgagcgtggtataatttatgctgagccgcaaactgcttcagctggaactttaaaaattcgtgtcaaaaacggaactggaactactgctgcaagccagacctacacatttggcggtaacggtacgttagaagttcctaacgaagtgtcaactaaaactctgaggtcttctggaaatgcaatagttggcggaactgttatggttaaggacgttcagatgcttgctgtcgagggattgaattcaatattcggcgcccaatcacagtccgcatttattcgttcccgtgacgctgatacacaaatttttgcacaggattcaactggatcgtatccaattttaactaccaaaaactatgcaagactagctgatggccgttatgttaataaagctggcgataccatgactggtaatcttaacttaagcggttctgctatcgtcattacaggttctgaatcatggtatgttccaacgaatgaaactgtactgagacaaggttcttggactgctgaaattaaagacgctactaaattacaaggtcttcgtggttatatggttccgatcagaacaccaattgaccctgctaacccaagcactttagtagtgaccggatatgaagaaaaaactgcagctggtggtgttttaactcaggttggtgtaactacaaacaatacttatcagctttggactccttatcctccgacaaccgaaactgctgataagcgtttcgcgcatactgtgtggatgaggatttataatccaaaccttaataagtttgatgattggatgcgagtgttcacgtctgctactcctccgactgcagctgatattggtgctccgagctcagtatcaactcaggttaaaacccttgaagtcctggaatggattaagcttggcccagttaaaatctggccagaccgtccaaaccaaactctcaaatttgaatgggtaggtgattaatggctgaaccaattttaatggcagcctttggcgaggatttcgtggaaacacgaatcctctctgaggcaaactctgtgaagtattggctaaaagcttatgctacgcattctaatgctgttcctaataagccagaattgaatattaatggtgcctttgatatgacctcctccttacggagggggattaatgttgttcaagttaatggtgacagttttattaacttcaaaacatttgacgttaccactgatgataacaacgctaataacaaagcgtttgtagaatatgcaaatggattaacttcaggattgtatattataatgacacatgaacgatttcagtctagtccgttgatagatagatggtttaaaaacaagtggtctgcttcttggccaggttctgacttttccaaatcatttccaaactctgcctatgttggagtgctcggagcagcaaaaggacgtatattaattgagtcattttacggaaatgatggcgtagtcaaagaagattccagagctaaagtcgatacagtgtatgataacgttggcgatgtaggatatactggatgtccttatcgttctattgaagataccaatgaatactcggattctactggatatgaatataaacgttatccagtacaaaatgaatctataagcaaaatagctgattatggattatctcctggagattctgtacttttagtatgtgatatgtatgcatctaaaagccttcttgatgctggttctactactagagctagcctgcgatggttcaaaggctcatctttattatcttcaaacgtatcattagaagttccaaaaaatggagctgatagatggttaagatttgaaagatttactgctgttcctacggacgctgatggatttactattgtggtatcaagatatccaaaaacgtctgtagttggtgactctaaaatcaaaaaccttgtatttgttcaaacttctcacggcgaacagttgaatagtgttattcaggagtttggtgtgaatggcataagaatgaataaaggcgttgaaggaggaaccactatgattatggaacttccaaattcaaaagtcgatccgagcggtgttattccagttcaatcgtttagagaaacatcagactaaggaagccttcgggcttccttttttcgtataaatagaaaatatataagaggataaactatggccgatttaaaagcaggttcaacagttggcggaaatcctatttggcacgcaggtacttttcctcttgtgccggcaggaaactccctaacttatagaggtgtaaaggtttatactgagatagataaacctcaagcaaatgataatgatttcgtatctaaagctaatggtggcacaggttctcaaggtttccaaaaggaagtcgaatttaaagaaggcgtaaaagtttctgcgactttcagtggcggtaatagtttaaacgggctttattctggtaatggagactcagcatctctagcaacagcgaacattgacattgtttcatggtacggtgtcggtattcgtacttcactggagggtagagaacggacagtagtttggaacgccagaaccggggaccaaataaacaaaggaagtataacagcttctattcttagttctaataatgctcctacagccgctcagcatttaacgcgtaaagattatgtcgatggacgaataaatactgttagcaacgtagctaacgcagcagtcaagaaagctggtgataccatgacaggtgcactacgagctgaagctggcgtagttatagtaaacacagcaacatccggtgaatatgctcctagattagatcaggttatttcacgcggggtaacaatagattttggcacatactaagaggtagccatggccgatcaaaacttaaaacaaatacaatttaaaagaactagcacagagaataaagcaccaggtgcagatatcgtagcccgtggcgaaatcgcgttgaatacacatgggcgtactctcgctatctataccaaagatgaagctgataatgttgttcagcttgctggtaaaggggttcctttcttagatacatctggaactcttagcgttgatggaactactacattaaaagacaacgttactatttctccgaataaagcgatcagttttgaaactactgatttaagcggtgaaataactcgtcatatcgttggaaaatgtgctactaatgatggctggtacattggtgccggtggtacaagcaataacggcattcttgaaatcggtactattgacgatggtactgaaactattcaattcgtacagcgcggagcaggcaacgtcgaagcccgaaaacttgtcttacttgatggttctggtaatactactcttcctggcgatttgagattaactactaataagaccgtaaaaatttcaaatgggtctactcttactttagaaatgggtgtaggtgctaatgatgcatacattaaaaacttgagaggctctggtgttcttcaattaactaatgatagcaatttgaccttcagaaattaccaggtttattacgccatgaacggaagaggtcctggtaaatccggcactcttctgacgaatgtagaaaacaaccgtcaggcatggcaatacgtaatttctgctgcaactgcgtcaactgctcgctgggtaaaagtagctacaataaagcatccaggaatggcctcttcgcagcttgatttaatgattactggtggcgttgattctgggcacggtagacattacgttgattttatcacgttatcaggacgaaatttaacatcatggagcaccaacagtttagataactgggttgaatggcgccgggttgggtctccttctaaaacgaacgttccagagtattacgttgttaaaaacgattctgctactgatgcggatgcgtcatttgatttttatgctaagattcctcgttatggcaatggcctttatgttacagtgctaaacgcatctggatacaacggccaagattcaggtacagtaattatctatgaaaccaatcaggacactggtgatactggaccgtccggaagtattcttgtttcaatgaaacagatttttgatagtttagcaaaaccagatttcggtgataccacaggtactcttccggttaaccgtggtggtacaggtgctactaatgtaggagatgcccgaaacaacctgggccttagaactgcggctgttcgcgatgttggtgaatccagcggaaatgtgatggaagttggtgcctttggtgtcggtggtaacggaaaatcagtagtagatattacttctgacgttgatttaatgactcgccttaaagctattggcggtacaacattcagagcaaatgttaaattcgttgatggcaattctgtgtgggacggcccagggttttactctcatggcgcaggtttcttttctagaactggcgatacaatgtctgcgcttaatatagattacgcaactggtaatgtcagagtatttgctataaatgaccgcggattggcagacggtaaagtaaattataatatgctttacggtacagcaaacaaaccaactaaggctgacgtcggacttggtaatctgacaaacgatacccaagttaagaaagctggcgacaccatgactggtgatttaactgttcctaatttacatgcttccggcccgggtactgcatcagtatatgttaatgccgggactgggaatgcacatgtatggtttagaaccgatggtaatgaacgcggcgtaatctgggcaactccgaatactacggatttaggtcagattaatattcgtgcaaaaaccacagctggtgtttctgctggtgattttagcttccgttctgatggcagccttgatgttcctgtagcagttaaaattggtggagcagcaatgctaaccaaagacgggaacatcacctccggttcaatgtttggtggtaaccttaacaactatttgacttctattaaaaatgatatcaccactggcgatagtaagcaagtaagcaagactggtgataccatgaccggtaacttgactattaacgctaacttaaaagtcgaaaatcccaatggaacgatggttgatttaggttcagagaactcagacaaatacagtagattaacccttgcccgtaaaattggcgatggcgctacagtagcaatgcttaaagttactcctgaaggacatgtacaattcgggtatcaaactgccgttgctaccccagctcctactaagtacctcctggttaaatctaacggtcttgaggtagaaggggatttagtttttaatcagacctatcgcggcactgaagaggcagttgatattactgataagactgttgaccttaatggtcttgtcattaaaggaaccgacccaggtactcgtcagatgtataaatgcttctcatatggtggtggttctaatatatcgaacaaacctacctctgacggcaactttgttcttgaagttctatctttgcgtaaaatttctgatactgattggacttgtaagcagacctttactacaaaaggtaatgttgaaggtacatatgttcgatactgccaaaacggcacatggtctgcatggaaagaggttgttgcaggggttcagccaattaatttaggtggtactggtgcaacttctgtagatgctgctcgtaataacctcggtgttggtgaaggacaaactgtatcattcggtaatttagttaccaacgatttaactgcaaatggaaacgttagattagttggaagactgaaccttggttctacttctgcgactggcgtattacgagctaatgaaaccggtgcggttgtcttaggttctgctagtggtcaaaacatccacatcagagcaggaagcccagatacttcttctggtgaaacccgctttgagccaaacggaaatgttgtggttggtggagctctaacgtcttcaggaagcttgcaagtaaatggcgaagccgcgatgagcagaagcttgatcgtttctcaaaacataaagaatactaacgataacagttttattctgatgggaaaagattcggatttaggtttcgttaaaaaatctggtgcaggttctaaactggtctttgcttcaggaaaaacattcacggttgctaaatcatcagcaactaccatagctaacccagcgacggaaacttatactgatgtgtttaaaattgatgctgacggaaaccaaactgtttatggaaatgcccaagtcaacagacagttaactgtttctagctcagctactgttgcagatgttattaatgctaacggcggtattattgttcctactacaaagtatgttcaaattgccgatgctcctacacaggataaccaagccaccaacaagaaatatgttgatgataaggttgcttctgctattagtaatgctggcgacacgtatcttccgttaactggtggtactgtaactggtagattaataattacaggtgatcagttaaaaactacatcgctttgggccactggagatactgctgttaatggtgctttaactgttggcggtaatgttgttagtaataccggtattggtagctttgttggtgctgtagatgttaaggctcctgctgcggataatggtacaacacacctttggttccgacattctaacggtggtgagcgtggtgtgatttatatgccgcgtgacaataataccatgatgggtttaagagccggcggaagtgaatggcaattacatggctctgcaggccaaatgatagggccaggtgctcgttggcgtattcatgcagatggtaacctacagggtgatgtttacggtggttatatcactaactatatcaacgataggtttaaccaatgtgcacagtgggttcgtactggtgctcaacaagactttggtccaattggtcgtccagcacccggtaaaactgttcctggtggttgggtgcttgttggtcttaacggtaacagtaacgaagctaaccagaatatgcaacttatcggtggacgtttacaagtatggaaaccgggcgttcaatgggttgattctgctacttgataataaggggcttcggcccctttaaacttaaaggtaaaactaatgattattaaacaaatgaaaggtattcaatggcatcacaatttcgagggcggagcttattatcgagactgcaacgacaagtgctggtattcttttagaaattctctcgataaaaattcccatatcattatagttaatgctaaaacaaacaagataattaattactataacggcgaagacccaaccatgatcgggttatttgctgataaagaaatgattttggatgtttatcaacttgacgattttcctgtggattcatgggatgaattcacacaaagagaatttgaatttgtagacgaacaagttgtgatgaccaaagatgtacaagttcctaaagaaagaactaaagatgatatcatgaaagatttaatgaagcttaaggctgaattggaatcattgcaataaatagctctgtaaggagagcaatatggcaagcaaacaatcaataccattttttgatatgtttcttgggttgctcgagctattattcaaagatggagccacgggaagagttctcttttcccgtgtttttgttgtcgtacttttagcattgttggcgtttgctggttataagtcagatagtcttattactgcttacgtcgatagtacttatgataagtatgataaactggttcaaaaggatagggatgcccgatttgataacacagcactcgaacaactccagatagtacatatctcaagtggtgcagatttttctgcggtctttacgttcagacctaaaaacttgaactacttcgtagacttaattgcttatgaggggactttacctagcacggtagattctaaaaacttgggaggatatccaatcgacaaaacaactgctgaatatagcacgcatttatcgggtagatatttttggacggataaggaatttgttttcttaccaacaaaaagaaaaccgcctgaaatatcgtatatgtttagctgcccgtatttcaatttagacaatgtttatgctgggactgttgaaatgtactggtacaattccaaacctgcattatctaacgaaagactaacatcgatatgtggtcaggcggttagagctcttggaagagctaagtgattacttattactatgcatagccattgttcgatagatagactcaaatccctcgttgtattcttcaacgagaattctcttctcttcgtcagttaactcagaaaccattttacgaaagttgctctgatttaactgacgcccctgctcgttcttgattccgatttcattcaagaacgcaataaattcatctcgcttctccatgatatgttcagcattgaacttagtcagaatagaagcaacagtaacaatttcttggacaatttcaaacttagtcattatttttcctacaacataatggattatgtgattatagtatcatcttgataccgcgttgtaaaccagtttatgccaattcccaacgagaattcaaatcttccttggtagtgatatactcagcaccagaggacatccagagcccgtagcgaccatcttttactttagccgttaaataccattcctttccaattggacgaaccctacgattcatccagtgacatacatcaattgcctcctgaaaagacaagtcaatcagactcccaagcgcgattttattcattaacgcttcgagatatctttgtgattcaacgacagattctaagttatgactcatgctaaaactacctctccgcgattacctaaaatgctttcgatatactcaactccacttataatgtcacctctatcctttgctttaatagtaataattccatacgtgtggaaatctgctgatagactaaacggtttagaagcttcctgagtaaacgtaaacattactgcttgctctaaatgttttacttctaagtcattagcccaagagttaagaactttaagcctaacttgtaaagtgtattctactttaattgctgaaagcaattcaacacgtttatgatatgccttggcttcatcttctctgcgtaaagtttcagtattcatagataatctccaatgtcataagcatcaacacatttctgaaattgttcaagaacttcttcaggttcaacgttagcaataatagctacagtaaaggtaccattattccaatcatgtaccatccagtctccatatccaacattctggaggtcttccattagttcagaatggatatctgctactaatccagaatggtcccctaatttcttatggagagcgtctaggtcatcacaaataatggttaaagtagtacatttggaattattcagaatgcgcattgtctttacctttgtgtttttgcttacgtttggattcatttgcggctcgctttttatctttgtgtgctccgcctttattaaaatcatgtttagctactagattttgcaccttcaagttccttgatgtaatagtcaatatctttaatcatttcttctgtcattattttgtacatttcagcaagaaatggtttagcaccgccattaaatggatggctaaacgggcagatgtattccttatccatgagagttttcatgaatttgctgtctgccattttaaacccggcttcattggtatatgtaccccaattatcgtccatcatttctaatgagcgctgaagcgatttacgttgaatttttaaaagtgtaatgttattctttaatgtactaatcattagtataaatcctctgagaataattcattagctggtcctgatttaggacgaactgtattaacttgacctgcatgtgtagcgatgattaatgcttcttcacgtgtgaagtactcaccccattggtcaacaaatccttgattgtctccatggacatgatcagaaaccaatttgtcgcggaacatatctagaacgttcgccatatcaacagaataatggcgagtgcctggaactacaattgttccaccagttttcaattcaaaacgatttgctgcacaaacgatacgacgttgaagtaatcgtccatcccaccaatcagctactttaaagcagatttctggaatttcgctatttacattacacatttgaccaacttctcgttaaaggttttaataacttcacggccatggtctgcacctttcttacagtctgcaattgtccatgcttcaccattttggtatttgtgaagagcccgggtattaatatctttcacaagattcataatcaaatcattaatttcttgttcagtcatttaaagaatcctttaattttctgccacaaacttttcttttcacgaataccaatctgacgaataacaggttcaccctgcattttctctaaccattccattgagttaacagcttccgctaatggaacaaatttagcaagggccttttggtaattatctacatccatgatatgtttaccatctgcattgtagatagcatagcattttgtgaatttcttatcaatgtatccgataaagtgtccacggaaccatacatcccaacaatcagttggcatattcagattaaggtcaaccttttctacacaacgctgaagttcattcaatactttaaacttgttcattacagttccttaatagagcggatgatggtttcaatgttttcagcagtacgggcgatatctaagtaagtattgcctgttgcagctacacggcaagacattccaaggtcagtgaagtgtttctgatgctcttcagaaatcttgtaaccgaagatgcggaaagtacctttgttgttaacttcaagactacgaataccgaaggtacgtttttccagaactgcgatatagttactgcggtaaacagtcagttctttcaaaggcaagatatcttccatctcaccgagaagtttcatcatcaggtctttgtgctcattcatatcttcagttagaggacgagctttacgagtattgcgtttcttcaaaagttcaggcttgttctcttctgcatagataactgccgctttagagatgatgtcctgtgcttcaccagtgatgattaaaccgtcaccagatttctcgatgagacctttcttaatcagaacaccgatgtttgagttaacagaacttgcgttcatggtttcttcaaggatttcacgcagttcagaagaagtgatgaaatcctttttagctacctgaaccaggatagcagcagttttttcgttcagagcatcttcggaagctttgatgatgtaagttactttagacattgtgattctccatgatgttttattcaatttgtttggtatgagactataatatcatctgctaaccagcttgtaaacaactttgtgaaaataatttgggcattctaaggagggattttggagggatatagatttatatggaaggacctggagatgacctccaggttccctagattaactgaggagcaataaaactaaacctaatacggcaattacagaacctataattaaataaaattctatcatagttcttccaggtctttcagatactcggcttcgggtgttgtcttttcccagtacttaacctcttgggcaagacgctttgcttcctgagcaagtttcttcgcttcatcatcagtgatgtgatagatgttcattgaaacgagtttttcagaatggtctttgaatagttcattctgttcaatttctttagtcagttgcttgcgagttttaccttggataacgatattacctgcgataacctctttgataaattgagcttttgcctgagcaagattaaacgcctgtttagtttcagcgattttatgctcgattcgtttggcggtgaatgtcttacggacttctacaaaatgacgaatcagctcaccggaagttttgaacttgtcattcagcttaccattctcatcgatgaccacaatgtattgactcattttctcaatgagcttaaagtccttcatgattttagcatgacgctgctcagggtcatcgctcaaagcatagtctttacggaatttcaccttaaagccaaacccggtcttagaacagtcatcatcatatgtgatgtatcctgcatcttccaacgggtcaagtactttttcaacgtaagaagctcgttcaaacttgtatggaatttcactgatatagattgagttccgtgaagtttctttatacacgccgtgcagctcaacagaaccgtcttctgtttgaacgatttttccgttaaatttaggaaactgtacttcaggttccatcatttcgccacgaagtgctgctttagtgcattccaaaacagattcaaaactatgcggaagaatagaagttgaataacctgttgcaataccgcgaacgccattcagaagaacagtcggaattaccggaagataatacgcaggtggaacatgttctttgtctttatgcaccggagcgatttctgtgtctttgtagattttacggaagttgtcagaaatccggcagaaaatataacgacttgccgcagcagattgaaccagacgcgaaccgaagttgccttgcccatctaacagaggatagttgttattccatgtgtttgccatcaatgcaccagcatcttgagcagaggtttcaccatgatgataacctaaatcagctacaccgccagcaacagacgcaagcttatggaatttttctttattaccgcgagctaaatcaagagcccgagcaataacaaaccgttgtacaggtttaaacccatcaattaagttcggaatagcgcggttttctacagtgtaaatcgcatactcttttgcttcattatcaatgatagatttcaaatcgcgatgacgaagatttgatgccttagccaaatcatcaatagaacctgcttgttttaatagagtgtcaaaaatatccattgtacctaccagattagtgagccgatttgtactataacatcggaaatgaaaagcacaatataaaccattccgtaaatcattccatagtacaaaattaaaagcaaagcggctactaaagccgctccaatcaaaattttcttaatcattggaaagggctgctataataagaataattgataaagttccttgcgctaacgcctgcgaaataacagaagtttcacctgtagtcaatgtcgatacgcatagagcagcccaaattccgccagcaattcctttaatcatttgtaaactcctacaattttacaaatacgctcaaacataataaatgctgcagtgaacgcaatgcttccgattactttagtggtaggcacaaggccataccacatgaatgttcctgagcaaatcattagggccatcagaaacacatagcccatcacgaagaaggttctcattagtatttctgcaaagtaaagatgaagttatcattcagaatacgattcagctcagagtaggtctgtgcgtcgcttgaatgctgacgagtaaacgccaatgcaagctgacctttgccataaccggtggtgagcggtttcattttattagcaggaatccaaaacacaccgtatgttacacagtttgaacgaagggtacgacccaactgagaacgccccgaacggatatgagaaagaacactttcaaatcctgcctttgaacgctgtttagctacaaagaaacgagcagatgcaccgatataacctgctttgccatcattgagcatcaggaaataaaatccttcacgctcagtaatttcacgagatggagcacctgctgcccaatcaccgttacgaatagaaccgatcagttctgcaccagcgttatcgagatcagcaaaagtcataatattacgcatgttaatttcctcagttgattaaagtttattctccgatgaggggccgaagccccttctactaccaaaaatatactactgccgttacaccaccaacccaaaacacaagaagacctaaagcaagcagacgatacacgatgtgtcgtttcatttttgaccttcccatacggtttctactaaggatttaaggccatcagtttgaataatatcaatcgcattaatggcaaaataaattccgaatccgaacacggcgacaattccaagcgctaccgcaacgataaaggacagaacaacggttctcattaagttaaagcgacgatcaaaactactacgaatcattatattttcctcagatgaaagcattaatccaaacgttaactaaatcccatgcgaaaacaccaatgaaagtaacgataagacagaatactacaaaggtgttcttcaaaatcgtaagtaactttttcattttgttctccagtttagctaacaagattatagtatcactgaagaccaagaaagtaaacaactttttaaaaatttgtgatgaatacttctactgtactgcctttgccctttatctggtatgagttgaatgtgtattttttgtccaaaaaatgaacattatacttagatgcccatttctttaacatatcgttggtttttccttgatgctcaaacacattactcattccaaactttagacctttggagtggcaatcgtccagaaaatcatacagcctctgctcttctgtttcagaccaaaatttattataatctgctacagtaattaggtacggtgggtctgcatagataaaatcaccgtcattaagttcaacatctgtaaaatgcttactgctaaattcaattttatctgaattttccaagaaatgcaaaaatttctttttgctatttttattaacttcgcgtcttccaaacggtgcagtaaatcttccattggaaatgcgtatcatattgctaaagctgtaatattgaagaactaacaacaataacgggtcgtgtgatgtgttgtagtcatcgcgtagtttataataagctgcctcatgctctgggtgtttaccgagatttctttcagtaatgatattcattacatcatcccacgtgcatgatttcattttgatgtacatgtcaatgatttctttctgaatatcgttgcttaaaacaggtccagtaacattcaacgatacagatagcccaccacaaaacagatcaacaaatcttgtgtattcgggaaaaagcggaagcaaatctttcataagtctctgcttatttcccgtgtatgaaattgctcctaacataaggttttaagtacctctttaaagtataaatttaatgattcatcaggttcagatattaacaatactaaaatattatgattaatagcaaaatcattaaatcgcgatacaacttttgaattttcggtaaatttttcttttttcttccaattatcgttgtattcaatatttggaagaaaatctgccacgattaaagaaaacgggtcggtgttatttgtaacttcaaccaaatgtggcttgtcttctaaatgaattgcaacagaatctattgcagttcctccagctatttgatgtttaatctcaataacgtggatttttcctgtttcggtattttctatagcaatatcatatttgcgttttctgctgcttactttaaacgcagaacaaatcaaacgagaagattgaggttttactccaataacagtctcaaactgataatgaactacatattttgaatcagcaaagaactttttggcttcttctaaaatatattcttctgctaacttacctaaatcatagttgcggcgggcaagtttagcagatactaatttttctacgatattgttcatgtttactccggttcagtttgtaaggccatagtatcatggccaatcccggaagtaaacaactttttaaaatttgtgcatgatatacccgccagctccaactcgtgaaggttttactacttccatgaggtgatcgataccgccggcaaacattggtgtgtaccgtatgacattctgggacacttcttctgcaacgaatataattatacagtctgcgactttatgtttaaacatgggccctagatttattccacttccatctgggaatggaccgtctttaccagtcgtaacattaatccatggcttatgatttgctcggtcatgaacaaagtgtgttttaacttcaactctaacaccttggtagtgtggatgagctaatacgtcccatgcccattcgtatggatcgttgttattatggtcaacaacttgattgttcacgtatccatcgagaaaatctgctaccacatactctgccggtatagcaattctgcatcgtttaagaacgtcaattctatcttgagatggatcgatatctaagctatatctagcagtatcaatgatttttacttttgcttcaccccttagcttattcaaatctagggtaaatgtccggagttggttcaatctctgcagggctttgttcatcaatgccataaattcctctgatatgtaattcaccaaaataaacacgatcgtcgtggttacatgtgtctggttccacaacaaagtcatcaccaagttctacgagttcatcacaatgcaaccaagcatagtgaacatcaccttcatgtttaactacatgatggcaaaacactgtagcagcatgatgagtaccacgaagattaacaactttagaatgagatacgttaaatggattaatcatgtttcacccataataaaagaggagcccgaaggctccttataattagcgaagttctgaaccccaacgatcagttacatcttctaatactacgtaaccacatgtacgcattttagcatcgttgtaatcaaccgggatagatactacatcacgcggatgaactttaactgaaacaatacggtcagaaccactaccgaagtgaccgatgtaagatttagagcagacatgcagacctgcggaacaagtacgctgatcgtcttcatctacctggttacgcggcattgtaacagttttaccaggagagttatcaaacgtgtttgaagcacaatccatataagtggaacgaactactttccaaccaatgaagtgaccatcatcagtgatgtcgatatcgtttgcattcaggaaatcaaacagacgataaactgcacgacgagacgggttcagcatcaggttttccaggaaaggcagataacgtttaaagtcttcgccatcttccatagctcgaacgatacgctcagtcagaccagatttcagctcgatatctttatagaacaaagtgccatcttcaattcggacgttaccctgaacgaattttttgatgccttgttccaggttaatgtggccaatagcaccagcgatatcaccatctacaagtttctgcaatgcagatttaaatccaggatgttggctatcagcattataagtagtacggccttcagtaattgaaatgaatttggaacttgctgcccatttaaattcacgctcaactggagcttctactttagcaggaacagctgccgcggcagctcgagcttcacgctctttaaacacacgccgaatggtgtcacgggaaacaccataattctcggcgagctctttcttagtgtacagaccgtttttgaagtttttaacgattgcatctttttggatttcagacagacaggtaacagccatttattcacctttattttcagaattttgagtagaagctccatcaaggagctccatgatttttacgatatcatcgacgagtttgctgtcagtccgccaagtatccaagacacttgcgatgacaggataatcatctttaaactgttcaatctttttatagaagattgtctcagcatcaccagatagtttattataaattttattacataaagctaaatcatcagtttcatctttgattttactggtacggcaaaccttagcgattttgtttaattttgtcaggaacggatttttcattccagacgctgtaaacttactcgacaagaaattcaatttatcgtaatgcgcaatatttccacagatacgatttccagtagcatttgatggcatgtactggtcataatctaccttatcaatacacttgatgtattggtcgataataaatcggtcaaatgaaagcaatccatcagcttttgccgcggctttcatagcacccggacgaattgcatagaatttcttaattccgcacgcttctgccagagaccgcatgctcgcgatgttcatattccaccaccaaacattatctgggaaagtgtggatttcatcacgattacgaccgattgcataaccttcaagctcagcaatttcagatgatactaaagtctgacggtcttcttcccaatacccgtctttatcaatccaatgtaatgacacattaggagatttcggacgtttctcttttggaccagtgtcataatcaggaagagcttttctctgggcttcaagttcagacacacggaatactacaacttcatcagtatccatgattttcttcagctcatcaatgacatgcaattcatcttcattgtctttgattacggtaatgtgtgcccagattggaactaatccagatttacacagggctcgaacagtagcaatacgcttgcctgctttatcgtcaataagaacgaacgctttagttctatcaaccccgcaaatatcagaaatgtttacttggttatgacgatgccaagaactgcttgacactttacgacgagcaggttcatcacatgaaacataaactgatacttcgttatcaacataatatgaacgaattttatcaagattatacttcgcaactacctgtttaatatcgcggttcccaatggtaataccacggctctgaagaatagagcgttccttagaactcagcttattgaactcgcgcaggaattcacgatcagattcatacgcttcaaacgctttaatatctgcagtaattacctcttcttcaagagcattcacgcgcttctggatattggcaattgtttcttcatcaagagaaagctcttcacgagatggagtaatgtctaattcgccaagagggaaatgaacataaaccttgccataacgattaagcagccaatctgccttaacatctacaccgctaatcggatatacgatttttccataaactgcatacagaccataactttcatacgaactattaacgctaaaccagtcagtcttatctactgggaaatattcaatttcacggcgaagagaatctacctttggaggtacagcaccaaaggtacgcaaaatatatgcgatttcataatgccaagtatcaatatcttctactttaaccggaactgtaatttcaagaccagtttcttcgtcttctttcatatcatcaacgaacattggacgaatagtaggttcacctcggtttttcatgacagtataaccggtggctttaccattatgatatgatactacgttaaatgtactcgtgtagctcagtggagatttagaaccaagaccaagagcaccgatgaaatcattactgttattctttgtggattcaaagaacgttttgtacatcgtcatcatgtcattatgattaagacctgggccataatcacgaattacaaagcgcgggtcaagacgagtaggagccttgatataaaatggacgattttcattgccgttcaatttatgagcatcatcgcagttagtagaaagttcacgaacaacggcacggactttatacttataaagtttatttgacaaaatgtcaaaagctttacctgaagctttaatggtaaacgttgaatcgtcagcgtcagaagaaccaataattacttcatcatcacatttaattttcattttattcctatcaattgtgtcgtttaatgatttctgctacttcaagtaactcttcagcagtagcggtgttagttgtaaaaattttattatggatttctttgaagcgttctttgaattcctcagctgcttggatgtcaaagaaccgctggatgatacgatattcacgatatatagcatcgttgaataattcttctgatgggatgtaactacgtttcataatattttcctcagtgatttaggggaaattatatcactataactttaagcaagaatcctagaatcatctccaagcacttcttgattaaagccatataaatccattcttataaagaaaaagggacccggaggtcccttagattaccacaccctactaactcgaccataaacctcatgtttagaaccatcaatgttttccacccagatagtaacccaagttccgggcagaggtttcttttcagcgaacagatatccatagtcgcctgagatcaaagtaatccaataacgttgcatgttaattccttctaagtaagggcaatagtacccttactatttattctttattcactcatccatgtcttacgtggtgcagcatcattacccataattaattcaaacagttctttccagttttcaggaagagtgactacatcataaaccgggtcttgaataacacgttcatattcatcttcttcaagagaaccaagacctttaatataacgaagtttccaacctttgaaatcatctttatggtcttcatattcaccaagagaatagaaccaacgttgttctttacctttggtaagaataataaccggagttttcacaaagcggattcggccttgttcaaacagctcaggccaattactgaaaaacgctaaaagacttgggaaaattgaaccaacaccatcaacatccgcatcggtcatgatagcaatatttcggtagttagtattttcagcgggttcaccgatagtcaaaccagtgattgcacaaatgtcaaatacttccttgttcttcatagcatctgctgcagacattccccatgtattcatgaacttaccacgtagaggatatccaccatgaagttcacggtcacgggttgtgagcagataaccaatcgcagaatcaccctcggttaagaataaagtggtgtcagcatctttaccatatttgttggctttgatgtgcttagctactttggctttctgtgcctttttagcagctttagtttctgcagctttctctgcagcaagtttacgagctaacattgcctcaataataggcatatgaatatcttctgatttcataatagcgttagcaagcttcttgtaatcaatatcaatatgactacgaatttcgccccacggagaagttagacgctctttagtctgagaatcaaatcgcatgttagacatatcacgaataaacatgataacagtcaagcattctttaattcgggctttgttgacttcaagcttgtacttgcgtttcaatgcaggaataagctcattgctgagttcatcaagaactaaatcaacgtgcgtgccaccgtttttggtgtgaatgttattaacatatgaaagttggcggaacccatcatctgagcggccaatagcaatagcacatgtatcagaatcctgcactacagcgttttcatcatacatgtgggcataagctttaaacttgccctgaactcgtttacccatgaatttaaattcaatgtcaggataaactacagctaacgtcatcagacggtcatgaatgatggattggtcaacatcagttaagccatcagattcaaagtgggtgaaatctgggataaatgacacgacagtaccagtcttgtctttaataaattctttatctttagctggatgttcttcccaagaaacattctctgcgccatttgaacagcggacaacgatttcattttttccatcacaggttgcacccacaaatgtcacagaaaaaatattcgttaacgcagaaccgacaccgttcataccaccagttttacgctcagaatcatcaccaaagttaccacccgcacgaggacgagtccatgcagctactggtcctggaatagtttctccttcaggtgttactacaggagcctgcggaagaccacgaccattatctgttacaataattttgttgcctttaacatcaactgaaatcttattcgcgtgtttgaaattagtacgaatagcttcatcaacagagttatcaatgatttcatcaatcagtttgataataccaggaacatactttactgattggaatttaccaaaaagaaaacggtcatgcgcttcaaacgcagaactaccaatgtacattccgctgcgcttaatgatatgttctcggtcactcagaattttaatttcgttcttaatcattacatttcctcggttagtgaaggaattatatcaactattaattatagcaagtaattcttctttgatatacatcaatttaccaagaacctcatggcctcctttaaccgctttatactcgggatatcggggccgctgtcgttcaaacatagtccattgagcatcactaacgttagcgtatgcatatcgagaatttccgtagtattgttcaatccggtactcgttattttcattaagtgaaatccattcttcacagacttcataatatttctgcatccaaatagtacggccattcacgtcattgattggccaccaagcaaacctatattttccaatagcccgctctaccatttttaactgtcgtttagcacgcctttgcgcagttgtcattccaataatcataatattctcctctggccaacaagactataataccaaaacacgatgtccatgtaaacaactaaatgacccgaaggtcatttattcataacgaattgtgctgttcttaagaaaaagccctgagcacactgttccgttaacaggttttcctgttggtccaatagccgtaaagcctgtgtgctgaaaatcatcctctgagcaagaaaagaacttatatccggtgattttgatatcagtaaatcccgcgttatctaacacgcgagttgcgttatcagcgtcagtgcatccaatcatcatgaaggcaagcgctgtaattaaaatctttttcattttaattttaatttaaccctataagttatattacctactttaataacccggatttctccgggtttcatggtaatgcgtgctttagttcccatcaataatcaccactctttaatccatcgtagtgaactgccggagcagaaactactcgcttcatttgaccttcacacttagggttaaagcagttaacagtatagtcacgatgggaaattttacgcataatttctatcttttttccacagacttcacacttgtaatcatacattggcattaacagcatccttccatttttgtgttttgaccatgatttgctcatttagtgcacgagtaaccatcatggagatttcatcatctgatacatgggtatcatttttatgacgatttctgaaatgaagccaaagtgcatctactacacagttaataacatctgcgcactcgccttcaaattcttctttctgccgccatggacgattaatccaatcacacatttctccagtttctgaagaaagttgcagcatgacattcccaatgctacggttaggaataggataagacagttttgatgcttcaaaaataggagctaaatttaacattgatatgcactctgcagtgctgcaatagcagcgattgcttgaccacggttatgaatagaaagattcataaccaaatcggttggaattacattcgcggaagttccaacttcagtaaagtatttgaattcactatcaaaaattacaaggtcttcaccgccgacttcatcacattctgtgccattagcccacataattcccgatactctattattttggtggtcaactttagtaacagtaaaactcccaccattttcatagagttcatacacaaagtcttcattaacctcatagcgtgaagaaaattcttcttcagcttcatcattgacgaatttgtactgtacgccttctttaaaattcattacacaatctccatgtattctgggccatcaactgtgattacacgagcaaaggtacgaactgggacgatatcaccgtgattcgcgaatacatacaaccaagtccagtgctcttctttaccgaaggttttctctttctgaacgacgattaagtccgggttgaacagaatgtcttcaaaagcttcggcagtaatttttacggtattttcagttttcatgttattctcctcagtagttgataagataatagtaccacatccttgtggcaaagtaaacaactttttatactaaaccttgacgctgtgattctgtcggctctacatcagctttaggcagaactgcatagttgccttgaaacactacgtttactaaggttttaccgtcttcttcccactcatcagtgacaagaacatttttatgcagcgacagattagtggctgaattagtagaactcaccgattgggtaataacattgtcaagtgaattcacatgtacccacttgcgcagatagctttcgttaaacatagaatcaagcaaatcgcgcgattctagagcaactacgaatttttgcagcgaatacacggctttgtcttcattttccaattgaagcaaatatgaagacattttgttagaacggttaaagattccaacaattacgccttctttaccgatatgcttaccaccaattactttaacgttttcgcctacaaccaaatttttcatcgtgtttctctcagtttgttaatgtagagccattatataatggctctttcataaagtaaatagttatcggtgagaaatttcacatccaacatcgacgccgaacagatacccagcttcccaccctttagccatcatagccttggccaccagaaccatcgttggagagattttcgggaggatttcccggttgaaccactcttcaaagttttcatcgaactcaaactcttccattagccacgccccttaggtaaactcagtggatcggtatcttctggacttggtgcttcgcttaggcctagagcataacgttgagcatatttaagcattaaaatatccttagcgcagtcatggatactatcatgcgcgataaacccgtcgagcgtaccctttggaagaggagtagttgtcagcccacgagtcagaagcagcgattcaattgcagtacgaatatcacgttgattccagaacttgcacggttcttctttaaatgtatcaatttcttcttcggaaattccttgggctcgttgaacatcgcgaagacaatcaacaaaaatcggaaagtcaaagctctgcccacggcaccaaccaaaggaatcccatggatgaattccattatcaatcagatattgctgagcttctttaattccagcaattactgataaatcgtctggcgttgaggccaggttagcacgggcctcagctgattgtttcttccaccactcaagagtagacttaccaaacaaccgatgacctttctgggatttaaggtcaaacttgatgcgatgaccgcgtttaaccaattcatcgaagctttccagaacttcagggtcagaatcaaaggtgattagagcaaggtcaatcacagaagagcttgacacatttccgaatgtttcaaaatcaataataaagtctttagccattttgagcctctagcataaatttaatttcgcgtaactggcaaccaatatattcgctcagatacacctttgggtcatatcctgtgaaccaagtaatagcattagcattatctgctatatcacgaagctcattcagaactgtatcaattttaatgttaatagcacgcttaacattatctggtgcttcaaacttagattcttgtaagccaacaatcattgtttgaaggtcttctaatttcaattcaaacatattacctcacacataaaatacatcatatcgacctcgggtagtaccaacatataataactgctgcgcgagagaagcatctgccatgtgaatgcatggagtataaatgaagcttctgtcaattgaaataccctgggccttatggaaagtcgaagctggtaatgctttcactttatgaaacttacgcttagcatcccagaactcagaccaaggagctttgcctcctttattccaattcttatatgtatctgcagtttttgccaagaagaattgaaacttattcatttcttcttcggatgagatgacacagattttctctctagcgtactcttcatcgtcgccataggtttcaatatctaatacccaatgacgaaccagatattcacccggaacacctctggcacccaaaaatgatgtggtttcaactgcatctaatatgcgaacaaactgaccattattgaaaagaatttcgctgaatttctttccttcaaatttaagttccttggtaagaggttcttgcataacaacaatctcgcctactacgaatggtcgttcagtttcgtatattcttcgtctgattatttcattcaatttatccacagatttattagtgaacgcaagcattcggttttcaaataaatcttctggtgttttaactaaattaaaataatttagcataaaatctttaagggcggttcctttagtaaaaccacggacgccatgaccatcaactacacagtcacgaatccacccaccgtttctgatttcagtagcaacttcaatgattggagcattacttcgcatcacttcggtcaaatgaagctgtaagaaatctttatgagtgaagaatggactcagtgcaggttcattacttccaggttctaccggacgtatttgagccttatcaccaatggcaatgacaatacaccaggcaggaatagttgccatcaaaatcttaaacagcttacggtcatacattgaagcttcatcgcagatgagaactcgaatagacgccatatccggaactttcttttgttcaaacagaacgttttcttcatatgtcgtcgggttaattttcagaagactatgaatagtactggcctgcattccgctgagcttagataaaacctttttggccccatgtgtaggtgctgccagcgcgatgccagagataccctgagaaatcaaagcgtcaatgataaatttggttaaagttgttttacctgtaccggcaggtccattaatcgtaatatgttgacctttagctccttgtttgaccatttcaatgactttattaaaaatcgctttttgactttcttttaattggtcaaacgtaatcatgccacttttaccctcactacatgtagatttttaatttttgctttgagtttttcacgctcaacatcgctaagtggttcatacactagctcagttgttttccaccaaagcattcctttggttttgcttttcccagtaaaattaccttttgctaatttgtctgttaaaaccgacattgtacgaatccgtgctttattggctgattcttcattagtgaagactacacatcgttctccatcatacatatcagttgtgactggatggtcaaatccgtctttatccttatacgctactacatatccatagtgttgcattacattttacctctcaaaagttggaagaaggacgcagtcaatggaagaccttttttcaattttaacttatctaacattgagcattcttctaaccgacgaagtgagttaacaattaaccgtattgattgtacacggatttcagcatctgacggacgattcggaactgatgctaaaatagcagataacttacgctcaactttagctaattcagacttaccaccactgatacgagttctcaatgcattaataagttctaaatcagccgaggttgcagttccgttcttttccttttttacaaattgagaaagatgattttcgcgattacgcaagttggttttaattgatgcgatagttttttcatactcgctaatcttttccaagcgagaagcttctttatcacttgtaggtttaacagaatcagaagagcgaactatgcgtgccgcaatttcattcgcttttcgctcaagtccttcaatcgtattatttccacgtaaggtattatacttttgcttgacaggaataacattccccattacatatcccaaatcgttattccagcgttcaagcgtcatgctgtcaggatggtttcctttgacggttccaaacttttcgcctgagtatgcgcaatgtgtctgctgcatgatgttaaacagatattctggggtgagattgaactccttgtgccgacgttgagcagaacctaaagttgtaattaaacgagtataaactttagcggtttcagcagtaaatttcatcatgttttcctcaaaaatgctttcgtcttacggacggtataatgggtctaggtccctagttctagataatcactagttaactaagctatagtaacactaaagtagtccataagtaaaccagatttttcaactttgttatgacccaccactttgaacttagttcccatcggtagcatcctttcttgttctttatcaatcatctcgatgtcagcgcttctgcgctgagcaatgttatcaatcacatcatttggtcgcatgaattcagaatctggtgcagtaattaaaagcgatttcatgttggtatgataatcaaacgattgctgacaattattgacttcaatgactacaaaggtcgagtaatgccatttgcctgcaaactctcgggcgatcgtttcatctgttgtgaatgacgccacctttccaaagtcaaattgctctcctttaataagagcttcataaaaggctttagcctcacggcatgatagacctctatagagagtgtctctgttatcaatttgatggcgcctaacgatagagtcaagtttcttatgaaattcttcgccaatcttattgttcatgcactgccacagaattgactgttctttgcagtcaaaacgattggctaatgcttcccatacgcttaaatcatataaaggtaatcctttgctttctcgcgcgaagttaagaacatcaatggaacgaatgggttcttcgataggaataacctttgataattttactgaaatagatgggtttaatgaaatagccatgatattctccattttggttacgagaggtatcatatcatggcgttttagaagagtaaactactttgtgaaattattttgcccacggagaccagggcggcgggtcagaccagattgaagctagttcatctagaagagcttctggggctttaataccatacttctgtataattatacggtattcgtctttgatgtccttagaaatcactggatgaacttgaacctcttcctgaggctcttccatcatttcaaacaaatccatcacatgaaccactcagtattgcgatacagacaaccactgttgttatatccatcagccgctttttgcaacagcgggcttggagaaagtttgataaaatctgcgcccatatataaccaaactaacttagtgaattctattagagaatctgtgctatcaatgataatctttttgcctcttgaaattatgtcattttcgtattcatataagctagtttcatgacatacattggtgtatcctttcaagtggagagcatgtagtatagcaacaggacttcctggaactgtatctacgtcaaagacatgggcagtcttaataattccataatcttcagaaggacgccaaccaaacgcctcgaatttattaactaagtctttgaaatctttgtcgaacgtactgtatagagcaacagtaaaaattctatcttggtctagacgcaaaactccatttgcatcacttcttgattgaacattacgttgtaagcttactttatagatttttgcgttgaacacacatagctccttcagtcatgttgttgtcttcaaaccacttatcatttgctttaattaaagcaggcgcagcttttagtaataacgctgcggctcttacacctctgtaccaacaatcaaaatgagacttctttaatggtgattgataccagggcttagtataacatatcattttcttctcctcagttagtaggaataatatactattcccaatatagcataaaaggactcccggaggagtccttaatttttatacttctgcactagcttcaaacattttagcgttggtggttgcccaagttgcagcatcatcaactactgttgaataagcagctttttcagatgggaaaatctgatactgcgcattagcaatacggtgcgaatcagaatataccatataccttaaaagctacagatacttcagtacctttaatttcgccatcagcagtggtatggtcaaaagttttgatatttacgtaagccattttaatctcctattagtttacaggagtatttatattccattttcaaatctctttatcatgtttatataattttcatcaggataacctaggctaactgctagctttctaaaattgacatatttaggtttgttgttattaatccataattctctaagctctttttcataattccatttaagctgatttctacgtgcagttttgcttaaaatttttcctttagcttttaaagctttttcagatgactgttttaatttttgaatatttaaaacttcttctatagataaattattttcctttgaatatcttatgcaaaaatcttttactgcggctattaggcaatttttgtgagtacctaaaatttctggattattttcttcaactaaaattccccaatatcttcggtagcgaggcatatcccttgaaatccagtcattataccaaaaatcaaagttggaatacatgaaagattttcttttgcgaagagtatcttggtttatccattgctcacgtttatcagcccataacttaatagtaaagtctttctctaatccagaaagcttcttaaattgtgagctatttactgaggtcattctctggaatgcattcagcaatccaaatcttccagttgaacataagagatagtgaacatatatgtgttgatatattgggagatatactctattccaaggatatattttaaaatcactatactcaggaaatgcgcatttaggaagtatatgatgggcttctgtcttagatttgatgtgagagtttaacttatacttatctataacttttaagtactcatctaaaagttcccattgcgggaacttttctttaagagcagatttgaaattaatatccattatcttgacgttcaaaattatgtttgtttttcagataatacagcttaaagatttcttcagaatccagaccaagcgccataaacatattcagaacaaagtgcaggatatcaatcatttcaaatttgatttcaagctggtctttatcagacaggtctttgatataagtttcctgcatcttgacgtggtcagctttccatggtttccacacagcactagctgccttttcaccattactcataccgccaagagatgtcagaagttcgcggaattcgtcatcaatgtaatctttttggttacgcagccactgcacgatatcaccggcttgagccaattcatcaggatgcatgttagtaccaggcttgtcatttgcaagacgaacctgaagagatttttgcatatcaagcattacttgcagagggtcaccaccaactttgcgtacgatacctgcgtatcgagcttcagctttatctgcaccagcgatcagttgactacattcgttgaaatgtggcatgttatttttcctttcaattaaattagataaatattatatcacttaacataaatagcaggaggattcatgtctgaagtgaaacaagaatgtaaagacaagggaggatttggaagatatctttacgtcggaatcgccactgctgctttagctgcatggaattatgtggtagttccattagctagcacacacgggctagttcttcctccaatgccgttagaaaaagttgtgtcgtttattatgactggaggattgctttaatttaaggggctttggcccctatatcttcgcatatttgtcaagacgcaatttagccattaaaccttgtgatatattttgattaatataacatgttatttcagaagcagttgctccttctttcataatcatatcatttatatctttgcttttccaaggcgacttatcccagaaaactaccctttcacccgcgtctactaaacgcttcatacgcttaatcgtatcaggatggcgaggttcatggtccataatccacgctcggttatcatgacatggaacttgagctaaatctaaagacccaccggtaattgcaatagcattatcaatgaacaacgaatctattggtccttccatgacgaatacgagttttgactcatcaatagtgtcgagaccataaattttggtcgcgtgttcatgggctttgattgtgatgtatttttgtggagcattctttcgtagtgctcgtccttgaaacgactcaatctctcctttcttgttgaagataggaataaccaaacgtggttcgttcgtctcattcttataggttcctggattaacggagttaacaagagaaggccattggttagtaaaccataaccttttccaagaagtgcttggaatacatctggcagtcacatatttaactatcggatgttccttcggaagtctatctaatcgctcgcagaaattaagtttttctattacggggagttttgcattaattttctcagacggttctacagcctttggcttatcaaagacttgctcctttcttttctcaagaagatactctcgatagaggtcgggttcattatctttaagatactgcgataaccacttgttatactcacagttgaagcaatgacagcgtaatccttgacctgcatcaaaaatccagaatcgggctttattgatatctttctgtgagtcaccgcaaattgggcaacggcagtttaacttgaatgttgaagatgtagtaacgtgtctaaatttaggtaggtgagatattgcacgaattgcatactcgttatcaacccaagacataatatttcctctggccttaaactaataaggccattttatcactttttcttggcagcgtctttatccgcttttcgtttctttggaagggtttcgggtcctttattgacgatgtccccggaagtggtacctgatgcaatattctgtggattgccgccagcatcacctgcgaccatctcggtaacaaactctttgtatgttttcatagagcctcctactatttattcatgcgtaatacgtaagcatttataagtaggatacagagtcggagacattgattttggattgtctttgataagcataaactgcttgcctgtatcttcacacttttgcttaattactgcttcatctttacctgtgaatgccatcttttcaatagacattccgcctgagcctgttgataacgccattactaaaacgtatgtaatcatcctaaaatccacttaacaatgttgaagttatcaaactgagcatcacagtaaagaacatagttcagcttaagtgctgcgccgtcgtctttaagttctgcttgcacttctgattgtttacttgggtctacgttttccacaatatgaccaacatctgcacgaatctgctgagctacttcagactcaacagcagtcattgaccactcacacaagtctttgtcatagttggccatagcaggaactgcagagcagcttgatacggcgaatactaaagcaagtacaatctttttcattttgctttcctcttctcaatttgtttcagtaaggccatagtatcatggcctttgaagaaagtaaactaccttttgaacaattttttcaacaaaatgtcagaggtcagattcttggtaggtaggtatgtagcagagttaacccagatgccatcgctgttatacaccttgacctctccatagtcgcatacagataggtctgctttgttatatgcctcaatgcctcgatgaatggtatctgtggctgttacaacaaaagagtgacctgactggtcacggaccgcgctaaacacaaaaatcataaaatttacctagaatttcaactcttctgccagagcatcaagcttagaacgtgatactcgttcttgacgattagattcggctacacggttctgtgcacctgcactttctcggacggtattggttggattaggcttagttgggtcgttttgcttctcaatttctacccagcgttgattagccttatgcacgcccataaagaacttattgttgatgttcttatcgccataacgtgatttaatctgcttaattaactgttgcttcatctgagcaagttcaggggtttcaatcacagccagcataaagtctgccgtagcaggtagacccgcagattctgcaatatcactcatgtccatatcagaagcatcccaagccgaacgaccgacctgagctgcggtccaaagaacagtttcagattctacagccaatgcgcgaagttcttctgcaatagctttaactaaagtgtaactgttttcagtatattgacgaatacggcaagaagcacaaataccaagatagtcaatgatgataacagtcggtttaaagttcttcttgagtttcaactcattcagaagagctcggaatgtattagcgttagcaccgccagtcggatactgtttaatgattaaacgaccaagagtactagaactacgccatttttccattttgcctttatattcggcgtatgatacacagccatcatcaatatcgtcaagtgatacatcaagcaaattagcatcaatacgtttagcacaaacttcttcagccatttccatggaaatataaaggacattatgccccatctgaagatagtctgcagccaatgaacacaatcctaatgatttaccaacgttgacgccagccatcaatacgttcagtgtaccagtctcggcaccacctttagtaattttgttcagaatgctaagtttaaacggaactttacgagctttattctggtatgataaccaacgagcttcataatcttccatccaatcatgaccaatatagctatcaaacgatactgataacgcttcgcgcatgatatcaggaatagctcccatatcaggaagacgcttatctcgcttatttggctcaagctgggcattagcctgaatttcaataattcgagacgttgcgttatacatagccttttcttgaacgtacttttcagtttccttaactaaccaattcaaatcttcgggagcatcagataacttatcaataagtttctttgcgccttcatgttccgtttcagttatagacgaattatccagtgctacacataacgcagtctttgaaggaattgctgtgtattcattaacgtgtttcttaattatgttaaacaccgtttgagcaggtccttgctcgaagtactctttgtccatatatggccaaaccttcgtaaagaaagcctggttgtaaatcagattagctaagattgtttctaccactttaacctcttaaaagattttccataatgattttttcttggtctttaatgcactctggatttgttgtttaacacaagcttccacatgaggataaagttcatccttatgagcttcagatggagtactaaactcaatagttacttcccccgaaggagaaatatttaatttatgaacataaaccaagtgtgattgaccatttaattttatcacaatttcttggataacagtcttcatagcttcttggattatttcatggcttttcttgaacactcgttcttgacgctcgaagtctccctcttccgagggagattcttgttcaaatttctcgagttcagattctaaatcaaactcagtcttcattcatgaagttctctaattcatcttcaacttcagcagctgatactgaaccactctcaggaagtttaacaccatcaaccttagttgaaacttttgagttaatcatttctgctaccgcttcatcaaccgcagcgtttgaatcaatagcacccaactgataacgggctttgatagcgtcacggaatggctcatgcttaaacagaggaccccaaaattccgtactgctcgtatcttttgcccgccaggatttttcttcacgaatcatctcaccggtttcaacatccaggaattctcgtgcgtaccatccatttttcggtttaacaacaaatccgatatccagagccatatcaagcagaccactgtacggatcgataccaccatcgaatttaacatcaatgaagaacttacttttctctttgacagtacgtgatttctcggcgttcaggacaaactgatatccttcaagctcagtaccatctttaatttgacgtttaccgatgatgaacacagtatccgcagaatacataggacctgtaccaccagtcattaccgtcttactgaacatctcgatagtctcgattgtgtggttaaccgcgacacaaggaatgttcttaatagagaagtaaggagttacgatacggaagagagacttcagacttttcgcacgagtcatatctgcgacagatttctcgttcagagcatcttcggtttcctttttagacgccatgttaccaatagagtcgataaacacgatgactttttcaccacgctcaatagcttcaagctggttaaccatatcgatttttaattgttcaaccgactgaaccggtgtatgaattacacggtcagggtcaacacccatagatttcagataagctggagtgataccaaattctgaatcatagaacaagcagactgcatcaggatacttattaagataagcactaaccattgtcagagacatgttagatttgaagtgtttagatggacctgcgaagatagtcaacccggactgcataccaccatccaacgctccactgattgcgatattaagcatcggaattttagttctaactacatctttctcgttaaagaattttgatttagtcagttctgctgtcattttagaagtggatgctttaatcaggcgagattttaagtcagacattcattatattccataagtctccattatatttttctcacaggttaaaggatagagtaattatattactttgttcttgaagctattaacagaagttccatttcttcttggtgttataaaccactgtttccatatctatttcatagtgtattttacatccaacgcacatgccatgccaccagcaatgcattccatctgagccagtagttccttcatgaacaaactcatcagatttacatacgaagcatctgaattcttcagccttgaatatgttaccagctacatcagatttatcatagatgttcataagaggtccttggagggctttcgccctcacagatatggttctaccttaccaaattcatggaaggcctgagatttcactcgagtgttaatacacatacgaattgatttcagaggttcgttatcaccgaataaaccacgtctttcaccgtctttagatttccaacgggcttgatttgggaaagcagcatgtagttgttcaagggctctattctgacgagcagtatcacgttgtgtagaacaaccaccaggagactgcaccttaccagatttaacgaggtacttaaacagagccaggtgaggatgacccatgttaattaattttagaaaagcataagcatcttcgttaaggtcaataattccgtaaccaatatcttctgctgtaagtttagtcaaatcatagaaagtattggtgaacccaaaactattctcgcgataatgaccccagcttgatgtgattttgaaaatcggcaagcgagcatgaccgtgataataaccacaatccatagcagtctcgacgtatttgaccatatcatcaaatacctcttgactcattgcctcgccgacaccaagcggaactcggcgatcgtcgcgttcacgaatttcagtcagatgaatggtcgtatcgtcatcaagcatccaaattcgttgtcctacatacatttcagtaatcagacgacgagttcctgcaattccatcgacatcatcgggcacagtaacgattttagcagcatgaccgtgccaagtttcgtatgcttctttttctgattcacgtactacaagatgtggaacataaccttcaggaaacatagtcagggcagtaactgccccggcgcgcttataacttggaattacaaactgaatcatttccatttacctttataatctttctttgcaatatgagtttcacccgtgtgagcataattatctacgagatagaaatgtcgagaatatacgtgcaaagacccgacgttccaaataatgtcgccaactgaataatttttacctgatgcattcagaagtttggttaactgttccagaacatagagctgccacgcatagtcattacgatatccaaagacgacatcgttagagcgcatgtttacaacagcatgaactttattatcacgaatcagatactgaacattgttagtacacatgaaatcactcatgccatcgcgctcaaaatcatactgcatttgaggtcgtgtataaatcataattccgcggcgagaatcaggattgctgataagttcttttgcacagttagcaaactgtgaatagttttgtgatgaccaaactgcccagccatagttagaattaatctcaccatgcttggatgcaattgctttccaaatagctggggtttcacctggaatatctttaacgaataaactttgagatttataccactcaagttcccgagcaatatatccatcattaactgcgccaaaaattaggttttcatctgcaataaatgatgcacctacgatttcaatagtcttcacacccgtcttatcaatcacaaattctttgttgagcaaagcatcagcgaattcttgacggatatcttgtactgtcattggagttacaatcatgagacctcttatttaacttgctggataataattgtattctgctgtgcgttagaagcagaccaaatcagcgcaattaaccaaccgataatggaccaaccgaatactagatttgtgataaagattccaccccgtgatttatgcttacgactgcaagctacaaaggtcggcaaaaaatagatgaagaaaagaatgattaaaccaaatactgcttccatgttaatctcctcagttagacatgcatttgttgtagatgtgattttggagagattttaactgctccatacgttgtttatgctcattataactcaatccgccgttagcaaaatcagttaaacgaatctggtcattcactgctgccgcttgagcagtacacgtacgttctttttgagttttacgcagacgcttaatttcttccagctcatgcttattctgctcaatcatgtcgagttccatcgcagatagctgacgattaggattagctttttctttcgccaaccgacgctcaaccgcgagcgattcagcagagacctggttgctagcacgatagtatcctacagtaccgccaattgctcgcacctgtccaacagaagaagccgggacgatatcaccttgtggcatttgacaaccagtcagcgtgagagcaacaataacagcaagtaacgatttcattgtaatctcctcagtatgttatttcgagaaccatggtaccacatccttgtggcaaagtaaacaacttttttaaaaatcgaacatgtcaagaagagacgatttctcttcatagtctaaccctgctgcttcagacatacccgacagaggtttaacgaacgatttttggaacagaacactgtggtcaagccacactagaacttcctgtcggatttcttgtggcagctcagtgcccgatggccatgccatgcatttctcaccgtacgggttaccttcacgcagcgggatgaccatcaccttctcaccttccatgattggtgttataccttcaaatcctgcggttgctcggttatacgctaaagcacctttaacgtgatatggagtacctttatctggatatcctgcgccatcatcatacttaccgatgttgttggcggtcttaacctctgcgattactttatagtcaagttcacgatactcagactcaaactgcttataatattgctgtaaagattcttcaccttcctgcagcatacgccgaatagattcttccaatgcattctgaacagcagttggcgtagaactttgctgagtttccatacccatgattttcaggtgtggttctgcatatcgagtaccttccatatcatacacgttcagagcatatcgtttcttcgctttccagaatccgccaatgccgtttgaccccaacggaggacaagaaatagcttcacggtccatgaacattaaatgttctttattgttcatgtattcacacatctcacgatatgattggtcaatccaaggttccattttcttcttgccgaattggttcaggaattctaccaaatcgttagtttctttgaaacgctcaagacctactttctcaataaccttatcaacacaaacgtaaattgagtcagtatcaccggctactacaaacgaatgtccttcagtaccgcataccttgttgaggtattcattaactttacgttcaatccattggattgccatttgaccaaacaaggtgattgctgatgcgttacgtaaatcataataacggaagtaaatgttacccaatgcaccataaagggagttgatcagaatcttacggtttaactggttagtgttacccaagatttcagcgtgtttacattcaaacatcagtttgtcaagacactcttcagtatatgtcagcagttctgctttcatatcatcagagaaatcttcatagacattaacttctgcgaatttatcgatagttccaaacttcttatcattcagaacctttttaatcagttcttgatttcgtttggcacccatcattttatttttccactctttacgctggtaaaataccttcgcgatttcaactggaatgacaccatctacatctttacgatacatccaaccattgggtgaacatgaatattcgtcagacggacgcggcgcagtcttgttaatgtactcacccaacggatgaagtttaaactgtccaacgatggtttctggtgaaatattaacttgtcggatgattgacggatacagagatgtcaagtcaaacgacatgatataacgatatgcagcaggaactggttccttaacatacgcaccaggatatgactgtttaacatgagaacgactttgcggaataactttgtcctgttctttcagactgttaaagatgattgcgtcccatgttttaattggactcattacaccttggtatggcatcttcgcataataagacatcgagatagccaggtcaataaatccacgaacagcatcaatcgcttgtactgattcaacgtcgatgatgttatacgaaatataccgttggtggttagtttcacgcaatttattgattggaccgtcatatgctaatttacctttcttggtttcataataagcaatgaaatccaacttatacgtcggttggttcgtgaaactaaacttcttatacaaatccatgtaatcaagaatagtcacacccatgatagaataaatttctttatcaccatacatgtttgtgataatcttagatgaaactttattcagaggagagaatcgtttcatcgtacgctcaccaagaatctgtttcacacgattcatgatgtacggaatatcaaatccttcaatgttccatccagtaaagattgctgggcatttctgttcccaaagattgatgtactcaagcatcatttctttttctgaattgaacggcatatatactacgcggtcaagaatatgttgtggaacttcatcaccgccttcggaatctaaacgagcagcgagtttcttgtcccactcggaaacagagccataaagagaatgcagtaaatcaaatacgtagaacttgtcatcaaccgaatcataatgagtgatagcgtcaatttcatattctgctttcatcgggtctgggaattgagatgcagtaacctcgatgtcacagtttgcaattcggatgaattttttattatagacgatttctgaaccgtaagtatcactgatatacgcgagtttgaaatcatccatacccattgcttccattcccatatcttccatacgacgcatccaatcgcgtgcatctttcatagttgggaatgtattcttcttgcaatacttgccatagatgtctttgtactttgtttcttccatgcaatggctaaacataacaggagaatacggaacacgacgcattcgttcctcaccagtagaatcgatataacgttctacgatgtcattgcctagagattcaacgctaatataaaattctttcatgggtttcctttgtttatagaccgagttattagtctttaggtgggataattatactccgatttttataaagtaaaagggccgaagcccttttcttacgcaccgattgtgtacttagattttaaagtccattcatgcttctgtttgaatgtaattactcggaagttattctgcatctgggcaagagtttgaccacgattaatactcagtagaccccagtcagcgagcagttgtgcgattgagtctcgacgaatttcatcttctaagtcaatagtaacagggcgaccatcaagctttaacatctctttaaaatggacgatatagtaacgaccctgtttctgaagaatgtggcagctttgatatagtaccttatctttgttattagcaattcccatacgggttagagtttctttaactttcaggaagtcttcaggctgtttcagtgtaatttcaatcatctttaccattccaatgctgttttcttaagatttttctgttctttcacgtttttcgtgattgtcttgaccaattcatcagtcacaagacctttcattttcttgagagcaggtttaagcttgtttttagcttccagggtctctctatacatcctagcatcaatcgcattgaccttgtaatatgtcattataacttgaagaatcaatgcatcctggatgttttctgttaacttagcccatttaccataccgacgacctctaggaacagaggccatcatgtagttatagtgtgcttggtcagatagcccttgaccaacaaggttcataacataaacagcaggcatacagtcggcatgctgagaaagagcgttttcaaccatgaattttgaataatccatagtcgagatgttcaaatgctctttcttttcattaatagaaccgataatctcgaagaattgattttctgctttttctttatatgaatcagataattcctggactttcgtccagtctttacctaaccacgctatttggtgctcgttatactgatcatcatcttcaaataaactcatcatttccactgcatctctacaacaagttgaataagcatataaaccaaatgtaattcaatcgaagctgctatgccatgatactggttattttcaccgatgatttcatacattcggataatgcttgggccagtaaccattgtatacagctcagaagaaagtttatctacaaaccaagtatagtctgctgcatatttcggagcaagagcacggagttctttgatgttcttagttttaatagcttcgatgacatcttcaattgaaccacggtcattcagaacgatagacaagatacctgcatcaatcacacccttagaagaataatgatcaagcatgttaatggtcttacggaattctggaaaattctttttgaccaaagcagctacaactttcttatcttcaactaccacgccttcattttcacaaattgcgagacaacgcttgagcatctcgatttgcattggcttaacatcagatggagatggtttaccaaaattaattacacggcaacgagactgaagaggtttaatgataccgtcaagattgtttgcagtaatgataatagtacagtttgtactatacgcttccatgaatgaacgcagatgtcgttgagattctgcaagacctgcacggtcaaattcgtcaatcacgataattttctgcttgcctgcaatagaagcagaacttgcaaatgcagttaacggtccacgaacgaaatcaatcttacagtcagaaccattcacgaacatcatttcagcattaatgtcattacacaatgctttagctactgtagtcttaccagtaccaggagaagtgctatggagaattaaatgaggaatttttcctttagctactaaagctgaaaaaatttctttatcttcagcaggaagtacacactcagaaatagtacctggacgatatttctgttcccacatgaagtctgcttcgtttactgtcaatttcatttatatttcctcattcagattaaagatggggccgaagccccgaagttattactcaaaatcaaaggtactgtctgcttccattgctactacataagaggctgatgcaccttcaaattttgcggcagtctgtttcttggaaccgttcatttttgcccacagcatcagtttataatcaccgatggtcatcttcatattgctcatgttgatgataaagttgaagttaccgtcaccttcataatcaccgagtgtcagagaatacttcggacgggtcagtgcagcatcttctactttgttatatccacgcagaacaattttaccatcaacattagtgatagcaattgtgtcaatctgcataccacgagacactcgcatcagttgctgcaggtcttcacctttaaaatcgataattacgtttgccaccgggaatgggattggtttagtcgggaacacgattgtgctcgggtcagctgctggccagaagatagttgagcgagcatctttaattgccagattaccatcttcctgcatgataatatctgcatcatcaccaaccagagacagaatgctcaggaaactgttcaggtcataaattgctacatcagtatcgatggtatcagaaattgttgcttcagcataagtcgtaccattaacagcacgagtcatgataaaattgccaggtttcagcatgataccggagttgatggtggagaagtttttcagaatgttcagagtttctttagagaatttcatttcaataccttttaattaagttcaggataattatatcaagctgcgaatgtagcagttaattcttctgcaacaatctgacctgccgcaacgagttgctcatcagcatctacacagtaatcattttctagacgttcgccaccgtgacgatcagtaacaattttggcaccagccttgattgattcattgtaatgcttacgcatcagttcaatccatttttctgcgacttcatcatcgatagatttatagaaagcaaagcgagcttcggaatctttaatcttatccttgatagcctgtttagtttcttcggtcagagccagaacccaagacttacgaatacgattttggttattcgggttggaatctgcacgcacgtttttaacctggatatctttcacatcaacaaaattaatcattatatttaccttaatcgtaataatcttcaaccatccaaccgggattcctgctggacatgactctattatattcatttcctgtaaaagcatctcgtaacatttcttctgttactaagtgcttttcatcagaaaacaaattagttaacacatatcgctttacttcaggaaaggccagcagatgctggcccgtagtaaactcattcattccatcaccgtgaatcgtccgaccttcttcatttgaaggtgttggccatatgcctgtgggtcatggtcacggtgagaaataataaacacattggcatctaccatcttattaagaatagcagttattgccttaacaccttctgcgtcggtggccgaatcataaacttcatcaaggaacagacagtttattttaacaccagaaactttttcagcaatatcacgccacgtgaatagtaatgctatatcgattcgagctttttcaccttgactaaacgaggcataactaaattcttctcgtccacgcgatttaatcgtttcagagaactcttcgttcagtgtgaacgaataatcagcttccataatttttaggtagctgttaatttgcttattgaacatcgggatgtacttcttgatgatagctcctttaataccggagtctttcagcatttcagttaaaataccacgacgatatttttccataaccaaattagttttgacgaggataattttatctaattcttcttgtagcagttcaatcttgtcagagttatcaatgaactcctgtgatgctttatcaattgctgctttaatacgacgtgctttatcaactgcagttaaagtcatctgcttcaaattactcatttgatttttgatgtctcttgcacgcgtacgaatagtattatactcgcgagctagttcatccagttcactctggcgcgtctttaactcgccaagaatggtattacattcttcaacatgatgattaatcttagtgattagagtgtcattagaatgcaaatcctgcaagcacgttgggcaatgaccgcctttatcatacagtccaagaaccttggaatatgattcaattttagaccgaattttaaatgttttaccttgaacttcttggattgactctgctgggtcgtctccaattactaactcaagcagttctctctgaagagtttctaattctgctttatatccacgggcttcattgacttgttcatcatacatcgtttgtaaacgagcaacgttatcaccagaaagtttcttctgcttttctgcgtactcatgatgagttttaatttcattagtcaacgcttcacgctgaacatcattaacctggatttgctgattgatttctcttatctgtgtcttgttcagtttgtccatatcagctaaaagagacacttcaagcaaatcttcaacgagctttcgtctattagcagttgataaccccatgaacggagtatatcctgccgttcctaatacgacaatctgcttaaacgatgtgtatgacatgccgatgagactttcaaagtaggattgaaaatcctttgaacttgcggcttcatcaagcttattgccatctcgtaaaatctcaaagacattcggtttttgtccacgtttaatgtagaaactatgaccgtcatactccatccacagttctactacagagtccttcttattgaaggagttaattaattgacctttcttaatatcacggaacggtttaccaaataaggcaaaagtaatagcttcgagcatagtacttttgccaccaccattcttacctgtgattaaggtcttttggcatttatcaagttgaatgtcaatggccgcttggccaactgacattatattcttatacttgacacgatttagtttaaaagtcttcactgattttgtgcctcaatgtataactgtttagacataacctttaaggctttgatatcatctgcggataggtcttcaagtgcttggatatattcttccattaaatccaataagcttttaacttctacttcttcgccatcttcagactcaaccgagttgtcaactttagaaacagttcttaattcatgtactaccttttcaagttctgattcaaacttaggaaggtcttcatcgaccgcagtgataataatgcgtactgcgagattacgaaactcttcaaagtcaatttttccagtaacaggataaatcagttttctgtgccaagtgatttcattagggacgaaatcaaaggttgataattcagtgtcttgaacccagaagccgcgtgggtcgttctcgtcacccgctgtaagcgtccaaggcgttccgatgtacttaacgtttgctgcgcttgatatggtgtggaagtgcccagaccatacttgtttgtactttttgaggaaatctggttccagcccatgagatttcattcctttataaaaataaaagccattaagctcccaatgaccaatgcagtattcagcagacgattctttgatatgcttcatgatttctgatgtgttctcttcacacatccatggacacaagtcaatcaaagtcccatcaaaatccatagtcacgggcttttcaataacagtaatatgcttatacttaccaagaacttcggttgatgcattaggcgtcaacgtattcttgtagtgagcatcatgattccctacaaccgtgattaaattaattccttccttttcgagagattcagctatttctctggcgaattccattgtcttatgagtgatagctttgcgaacatcaaaaatatcgccatattgaataatggtagttattccatgctttttagcatattcaatgtgctgctttattccatgtctttgcacttcttgaacccacgggtcatcagctttaactcctaaatgccaatctccgctatgaattattttcatgtattcgtttccacattttagtagctgcttttgatgctgcaccttttaattttcctaatacccagccgggaggtacattatcaggatggcacatcatataatctataccgttattataccatcttttccctttattatgtccggatgctttaaatttacgtcctttaacatacccaggtggaatatatggtaaaaatgcagattcaccagttaatggattatgagaatgaatgtttcctttaccgttatgacttccatgcaaagggtggttttctcctgatgtatctcttccatgcgagccgtttggagcagcaaaagccatattgaaaaagttttcagatttaaccacatcgtgaagtttttgataccgcaactcacatgcagtagcctcttttcgtgtaggaaattcttctatgatgcaagtatcaaacaaatgaggattatctttaagttctttattatagatttctttatacttcttagatactacagtcccgtgatatccattaagaaattttttctttgaagtagaacctatataaaactgagggagtttatctccctcgtatatggtcaagtaggttacgaacataatctatggtttactgacttcgtcattccaagttgatttgtaaaatataaatgagttatttcatatatactataaaatttatatggatttctgaaatatatgtcgccgtatgcttctctagctccagcaacaatagcttcagatattcccatattatggtcatttaaatatcgttctatttcttgatttatttcgtgtaccgttgttacatgagaatttgggcgttccaatgttatttccttattttgtcattaactcaaattgttctttaaagcaatgctcagaatcttggtgttctaccaggaattcaaatgctttatttcgctctttatcatagagcttctggtcagatgacagatgtttcattcgttcaaagacttcatttttattttcatcattcaaccacagaatgccagaatcatgagaagtcaacggctttccatcaatccggaatttcaaagcatcaccagtagctttatggaacacaggaatagttccacaagcgcctagttctaaatgtgtgtattccagcgaacgctcaaggaatttatccggaagacgtgacagctgatagccaaatccagactgagacatacgctcaagcatctcagagttaacatatcggtcaagaacttgaggattcagacctggcccagttttaacctgatgataatgacggcaatagtcaatttcatagcgttctttgatgttaataaacgcaggactgcgttctaacccttccaagatagtcgttttacctgcaggacgcagatgactttcatgaaagtcaaacatcaagaaatagcctttccacgtagtagtacgaccaatccaacgatgaatatcaaaatcaatggcagagaagtctttccaatacttatcacgaattgctttgatgttcatagcaggttgaaagttataaactggaggagctgagtcagaatcatcaaagaaactcaacccgccgcttggaaaatattcttccattagcacggtgttaaaatcaccgttggagctatgactaaacaaaacatcggcgcgcttaacagtttcttcaagaccagcgtttctacgcagtgacaaggctctatggtcatgttgatatacgactacccgaacctcaggtttaatgttctctatgagcttcttatagttatcaatcgctgcttctggagcgttgacagcaggtactgagttgatgataagaatgtcacatgcgttaagcagagataaagtcttatcgtagtcatctgcaagagacacaggaatagttacatctttatagctatgtgctctattacgagtaaacgctttatctttagcgtaaatgatatttacttcatggccatgttttactaaccactcacggtgctcgagactgaacttggttacgccgcatccctcaagtccgcgagccattaaaatattaatcttcatatgttgacctttgttgttaattttgaatattttaccattcccgtaataaagcaaaagggccgaagccctttaaattttcttgtatacaacataacctgccgcttcacatatacgccgagcttcttcaaagcgtttcagcatatccaccttggcattatgaattgcttcataatcgggagcaggtgcttctctcctagcggtatcacatttataacagaagtaactacgctttggtcctgtataacgttctgaacaattattgcaccggcacgcgtaatttccttcaggccaatcatgcccaggattagaacccatcaaattcgtcatacaccccaattctcttcatttaccattcataccaccgtttaacttggaaggtgtcaacccagacaagagagttcttatctattagcttacatccttcggtagaacctaacacacgatattgattatctgctacttttactgccattgttccagtagcagtgttcaaagtaaatcctgcgtctttacgaacacgtttaaattttacttgtaccagcatttagaatgtcccaaactgatttacgagaggtattccagcaagtcagaataatctcatcattaaaaggttgttttaaaatagtacgcagtttttcaatagcatacttgtaagcagggaaattgttgtctaataccgcgtctccagcatgagctcgtaatcgctcaagttcacgacggtttttacgaacaactttgttggctcgagcaatagcttgttcttctgcagcttccattagtttctgctgcagttcgtcgcgctcttcctgggtaatattgttcatgttattcctttggatggtaatttatttcaaatgtgaattcagtatcagtccaattataactatgttcaattatagcagaatctgatctgaaatcagcgtcatgtggatttttcgggtcaatgtgaatatcaagatcaagcacctcccttaaatacatctttagcaaataagggatagcgtctaggtcttgcacatcttctaaaaacccgtcgaggttaatcttcagcctcatataaaaattccagattaggtccatcacttgtaggttcgctctttttagcagaccctggcgccttataagcggtggattcatactgcgtcattttatcgtagatgtcctgaataaaggtttcatctgctaacgcaaccatatcatcgtcccgtgaatcatacacgttgtggacaaaatagctgtatttctttgccatttctttgcgttcttttttgatacgctgaacgaatgcattgaaacaagcttgggttatatacgcatgcgggttatcatacttagtttcatcgaagttgattaagcctttaattgcggcttcaatcccgtctgaaatcatttcttgcttccaggattgggtgtatcctgaaaagttgaaacgcttactcagaccttcagcgatcagcataatagcaaggccgatcgtatcgttctgttttactactcgagggccgccagcagcttcagactcacgacacttctctttccatgcacagattgatttatacagttccttgttatttacataattactcatattgcctcttcgcttcaattaataatatctattataacaaatttgggaagcgagaggattaaagcattacttaatcaattcagcacatgcaattaatttcatcatgatacgataaaaatcattatacgtgaaatttagcggaacatcaataacggcttcaaaatcttcaaatacacgctccattccataaccagcgatatcatctgattcagcataccagtacgttccatcttgtgcaaaagttatttggctattttcaagacagaacacacctttaatattttcatgtgtaagagtcaattgaattttcatagttcacccttcataatacgatagcattggaacagctgttccatgatacgtttgaactcaaccaaactaagttcaaaccaatcagattcatctacttcatgcatcatttccatgaatgaagagtataaactttcataatgagtttcatttaacatagaggcatgcgtttcccaatacatgccctcttcattgtcaaaccaaacacccatataagaatctatagtaaatccgccaatgccttctactacaatcataatttggtttactttagccattctttcaccgagtcaatagcatcttcaaatttagagaaagcatccacggatgtgtattcattctctccagagcgttcataaatccaaaacgcgtcaaaatcttcttcaatgatgaattcaccgttaggagtttcaatcgtatttctgccgtcaggcgttttagatatgaaccatccaagaaaaccaacttctgcaatctgttcttcagtcatttagaatttccaccaattgattatagtttaatgcctttccagaagaaatcataacattacaaaatctgtataatgcttcttttgatactttatacacataatcagaagttgttataatgtatgaaatacgtacaaatgttggggatttttctgccaattcatacgccagttttctagctctgccaatatcatcggcaaacttggtatcagcaagcaaaatactatcaaatacccaacggttagtaaaaatttctgtgtatagaataaccttacgcatcaagatactctcgcagttcttgttcgtttaacccttcttgccacatctctgacggagatggaagttggctgtctagagtggatgaatcaattggaaatactctgataattacgctagtatcttcatcccattgatttgcgagtatccgtttagcctgactaatatcaggctcagaatgagcccggatatacttaatccttctatgccatacaccggtaggaatagatgcgcacacgatatatgaaatcatttcgccgccttaaccgctttaacatcgcggaagcctttcttacgttgattcttcatcttacgaatagtgctttcagaaatttcaccgatacccggcgtgattggttctacaccgaaggctttgatgccaaattcagacagaagataagcaaccactaattcacggatgcgggctttaccaattttttggccttcttctttcatcgtaccgtgaagctcaacttcccactgatcaagcaaagacggagttacacaacgtccttcttccagcattgcagatactttatcataagcaaaagagttcagtacgtttttgattgcttgggacatattaatttcctcagtaacgattgttttgacaaaggagattctaaatcaaatctcctgtagcaaatcaatctttgagagattttagctcttcgagcatatcgtagtattctttactagcaaccggagctacagtgcagttgtagctattgaattcatggtatttcacgaagcgttcaagttgccactcaatcagattgttaattcggtgaagcagaaccccctctgaaccgacgtagacaaccacttcaaattgaagcccatcccaaattctggtacggacgatatcacctacagtaaaagttttcatgcgatgtaccaatgttcgttttgccaaggctcacccttgtaccagcgagtcatatcatatccgttctcgtcacggatagcgccattacgcatatagaagtactcgtcatcagtaaaatactcatgcttaacgatacatcctttactcatagcttctagagcttcttgccaatttaaccaattcatattttcctctcgagttaaacggtatgctgttatccgtcgatagagctatagtatcactcatcaactagcttgtaaacaactttgtgaaaggagtttagaataaaagagaggtcccataggaacctctaaatgaagggtatagaaatatacagaaggtggccaagatgaccttagaaaggaaccggttaatcttctatgatatctgggtcatgcccagcagcaataagattggttttgaatgttggaatgtcatactgcttaacgttatccataaaaatgacaggataccgaatagcaagcgatggatagcacccgatgcgtttagcaagtgactcaatcaacggacggtcataaaccggttggccgtcaacctcgttgattacgttatagaactcatacggaagttgcagcttatcgagcaagtcacgaactgctttacatccagggcatctccaaacttcttcagggatgccatagatttctatcatagttcagccttaatctcagaaatcaatctttcaattaattcaagtttatccgctgtagtcataggataaattttgtcaacagtggcttcttcaagatagcaacggtcagcatcgttaagtatacaccactgatcaaaatcatcagcatctatgctaacgccgttgaaggtcttaactcgttcaacagacccgtcctgtgtcagagctgttaccaaaaatggtttaaacttaagcatgttgtagaattcaacatcctttgacgacgcgctatttagccatttatcaacagagtcttctttaaacttgtaccacttatcgcaacaaaataattctatcatttcatgacctgttgaagtttggcagtcagagtattaacacgcttctgaaattcttcattagacagtttttcatctttcttggtaggattaatccaatctgcgatgataataagaacaataaacggaattgctacgaaagcacctgccgttaatgcaaccaaagcgataacgttagaaataaatttacgaatagcattaatgaatttcataattttccttaaatagttaagatgaatgctgtcatagccagaaattctggtccaaacagttcagtagccatgtggttcagagtaaacataattttgtaagtcagcatataaatttcctcaatcatgtgtccaggtagaaccgtttcttacccagagtctttggttatcagaaccacgccaatttttagtggttggcagtgattgctcgtatttcccatcaattataacatcaatgtgttgtagcaaatctaagtctttaatatcttcaaatttatatcctgtccacatccagatatctttctccggaaatcttgctttaacccaagaaactaaatttgaaatctcttcccggttctgcggataaagtgggtctccaccagttaaagtaagaccttggatatacgatttgcttaaatgggatgcaagctctttaacagtattcatagtgaataactgtccgttacgagcattccatgtactacgattataacaaccttcgcatttatgcaaacatccagtgacgaagagaacgaccctacatccagggccattcacaaagcaacatggatatattctatcatagttcatttatatatttccaattatagccttcaacacttttgcgttctccatttaaacattttaaaatatttcctttactagaaatgttaaaatatttcgcagcatccggtatatagttaaatgtttttaaaagaacaccgtttttatatgcaccaaatacattgagagtatatttttctcgaagacgctggtgctttcttttcataatttcaggattttcatacgccagctttaatgaatttttgtgccgctcttttacttcaggcttttgcattgctagcttagttaatctagaaattttgcttctaactttatcgtctttcattgtatttgataaatttaataaagttttatttctaacttcaggcttttgcattgctagcttagttagttctgcatgtctttttctaaaatcatcattcttccacatggtcttagacaattttgacatagaatgatgaagcagttctctttcttttgaatataatttaagaatttcatccaattcgtcagtattaaatctactaacgtttgagtttatcattctatgaaaggcataacacattttaccgtttccggtttttgccaaataatagtgagctaacgcatggtcatagtatgataagttaacgatattccatttatctgatttatgctcaggaaatatagatttaggaagcacatggtgtgcttccgtctttccttttattttagaattattgtaatttctttgtattaaagctgtatacgatagtaaatcgttgtcatcttcgaatattgaagatagcttatcattcacaaagtcagaagggtagattctgtcgaaattcattgaaccttacctcattacgtgcttctacttctgcatcatatttccagggttcatcagtttgaatagccccagccgataatccactttcggggtcacgggttatagcaattcccaatggatgcagaacctctttgttgattttccaaatcaatccccattcgctaagttggttccaatcaacttgcttcattggtttctctaacatgttttaccctatgcataatttctttgttcttaccaagattgaacccgcgctcagaaggattaccaagatagccacaagtcctacgaattgtattcattttctttggatcagtttcaccacaaattgaacatgtgaatccgttttcagtaggtgtcatctcatgagtagaaccacaagaaagacatttatctactggcatattaacaccaaaataatccaacttctcgatagcatagtcccatacagcttcaagaccttcaaggttacgcttcatgtcaggcagttcaacataagaaatatgaccacctttagcaatggaatgatatggtgcttcacggtcaattttttcaaaaggcgacaggttttcttctactgacacatggaaactattagtgtaccagcctttatcagttacgcccttaacatcaccaaacttggcttggtcaatcttacagaaacgatagcacagactttcagccggagttgagtacagactaaaggcatagccggtttcttcagtccactcgtttagcttagtgttgatgtacttcaggacgagtttaccgcttcctttaaaagtaagcatatcaaattcgtgaatgccaatatatcctaatgaaattgaactacgtccatttttgaatagctcaagaatttcatcatcaggtttcatacgcacaccaaaagcaccttcctggtaaagaataggagcaactgatgcagtaacaccttcaagggatttaattctagttaaaagagcttctttacaaatatcaagacgttcatccagtagtttgaacagtttattactgtcatccgaacttttataatttgcatccagagctatcctagggaggttcagtgttactacccctagattattacggccatcaagaacgggtttgccagaagagtctctccaagcaccaaggaaacttctacagcccattggagatacaggagtttctgaaccggtaattgctctattatttcgagcactgatgatatcaggatacatacgtttagctgcgcattctaatgcaagctgcttaatatcatagttcgggtcttctttacgtagattaatgccttcttctacaaacatcacaagctttggaaagattggagtaattccatcgcgtcctaatccacgaatacgattatcaagaatagctcgttgaattaatttttcttcccatgacgtgcccataccaaatgtgatagtcacaaacggagtttggccatttgaactaaacaaagtattcacttcatattcatatgcctggaaagcatcaaatacatctttttctgtttttgaaatagcataatcttttactaatgctacttgatatttgcgtgcatcacgtacatgtttagcgaatgtcttctccacataaggagcaagaactaaatcaacattagcaaacgtagttccaccatactggtgagatgctacttgcgcagtgatttgcgccatgatagcggtagctactccaatactcttaggagtttcaatttgagcgttaccaagtttaaagccattctgcaacatacctttcaaatctaccaaacaacagttggtgaaaggtaaagctggactgtagtccatatcatgaaaatggataacaccttctttgtgcgcttccattacagagaaaggaatgacctgattggcgatatgtttagatacgataccagccatcaggtcacgttgggtaggaaaaacacgagaatctttgttagcgttctcgtttaagaggtccttgttggttttattaataagtccctggatttctaattcgatattcattttaaactcttacgaagctgcttcttgtattttgaagcaagttgtgattttccatcactttcctcgtatgtaaacccgtgcaattccatttcagcaatcatctcaggtttaccaagacgtgaaaagcgtttagccatatcggcaacatattgcgggtgaatattactgtctttacgattctggcggagatagaccagcaaattctctaaccattcgaggtagtcaatatcttgaccttttaaaccagagcggttgaacttatgcttcatttggccttctgccgcattacacaggttacagagcaagcctctgacctttcctgcattgtcaccttctaacgcatggtcatggtcgaggtggttcttttgaatatcctcatctaaaggacgtttgcagcaaggacataatccgttctgtgcctgatatagtttttctttttcttctttatataacttaccggttaataacatactcttacctcagcgattagataagagtatttatagttaaattaacgagtagctactatatacattatgattagattctttgatgcagaacgaagtacagaaagcatatatgccttcataatcgtctacagtgaactcaatgtatgaattagtttcttcatgaagaagactcattttagtccaagccattccattgatgtcatcgtcgtaatagcctccactaaattctactatatcgccaacttcataccaatgactgcgtaaaatttctcttgtaacacgatgaatatcagcgaaatcgagaatttttactgtaatagttttagtaatgcacgatttagacatggcgaactccaagacgctgttcaagggcgacgatgtaatccgcggctttttgcattaaatcatactcttctgaatcacaattttcctgcccagcaaaggcgtaaagagctctggtaattggaacgattgcaccttggaaatgattaagtttaatttcagaaatcagaggaacatcttcaccttgaccgatttctttaatttggtgcatcgtatcttcgctgtagaaacaccagaaccaagattcgccgtgtggagttgggtcgttaatagtaatgattttatttgtcagtaaatcaataactgcagtgattcctaccagttcaaggtcgtcttcattatctgcagaaataacttgaaacttaaatcccggaatgaacataggaaattgttcgctcagttcatcatcattctcaataacttcaaactgcttaccaataagccccattcactttgtcctcataatcaagcaattcatttatggtaggttcagaggtattataatcctcttcaggaatagcatcttcctctggctcgacagtttcccaacgagccgcataccagggttttagacctttgctactttgcatggtgttggttcagaatcattagcagaatcatgttcaatacgccattcaacttcagtgcgagtaaccactttttcatgacgagtaacgatatctacttcaggaggactataataccaatcagtatgatatgaacctgaacgggattctgataccatgaaatgaacaccgcgagcaggataataccaaatttgagtacggtcttgatacttacgctcttgtgtccagtctccatcttctactaaaacaaagatttcttctacatcgtcatctggagcatttggcggatattcaaaatcgtagttgtcgtcccagccaccagtgacgccagcgatatgcttgatttcttttactaattcagcgttagtcattttaacctcgtagcttctgtaaatcttcatcatcaatccagctttctaaaccggatggaagcgaacattcaatttcccacagcaattcttcaattgcttgcaggcgttcaagctcttctgctgaaatagttaccatgcgtggagcttttaaatcgccaatatcataactcatagttcttcctcatgttaatcataatttaaccatacactcgccgtatttccatttagacataaccttaactccattagagtaagttacctctaccttcgctcggtgattcttaatctgcttaatttcaccagtttccaatccaccgtagccataataaagagctacaatatcaccctcccgaaggagggttccacgataatcatgcattgaatttgaatttacggagttcatcaaaaccgccgatatgtgtaccgtcaggagcaaaaatctgaggcatagttaatccaacctgtgattcacgacctaaacggcgaagcaaatcactgataaccacttcatcaaatacacctttttctggcattacattgatgaatgcatactcttgtttcttaacatcgagcagacgctttgcattatcgcaaaatacacacttatgaatgctgctgtcgtaaccaaaaaccgtgaacatcttcttctatttccttaaatacttgagcttgaacttggttccaactcgggtgtttatacgctttataaacgttaatcattccaaggcgcttcgtgacttcgccatcaattgcagcttgggcaaaatttcttccacgggtcatagctcctttgagattggagctgttagcaatttgaccagtctcattataataaaccgaatacatgagtagcattactcgttcggcttcttccatatatcgtttacgagccattttcagccttagtagttataactaatgttttaccatctaacgcgtcgagaatatctttgatgcaattatctggcattggttgaacgctagctaattgcttggcaatatcatcaggaattcccatgcgaggaatatttaatttgctaaaatcaattttatccattagcagttaccgggaagtgttctgccaatttagcagcaatggcagcgttaatttgatcagcgaaattcttattcattgcgttaacaatgatttcttgaattcggagattagctctttcaatagacatcttaatacgaccttcagcttgcttaacagcgtcatcaatagtttgacgaaccatatcatcaatagcatttttagcgcatgattgggcagcgttacgcatcatctgtgacatttcttctttagcagacatatcattccaaccgcgagtatggaacatctgctgaacttgcttcttaacttctgctcggacatccggaatagtcacagcagcaatattaacttcagattgtactgcttgcttcagcttattctgggaatcttttaacaccatttctttaacgatgttattgattaccgattgctgcagttgagcacgggctgctgtaccttctgggaataactggcgtactgcataagtatctaatttaatgtcaatcattttaattttctctcaaatttatgcttacaagtccgacatttcattttcagaatatcggttgtccaatcaacaagctgtacttgaatactaccacatttttcacaaggcacaacttgtttacatgcagcttctcgacggtcaaccatttcaagacaagctttccagtcaattttaaattcaggcacgggtggatactcaaactcaatttcaaggtcgttatcatcaacgaccatgtcttcttttaattggtttttcacagtaagttccgggcatactcgagagattcataccgctctttgtactcattaagcgatttgactaaatctgccatcatcaattcatgcttacttaattcagcttcttttgtatcaataaaccgcttaactgattccatttcggcagtaatactattcttagcgatttcaatatgatttactggtgttaacggaagaggcttaacaacattgagatacatatgtgctacatcttcatcaataactggggtggtgctcaatgttttgggaaaaatcttaaatgggtccaaatgcacttcaagaacagatgagttttcaccttgctgtttgcaacatgattttttaactacgtccatatgctctaaagcagtacgaacttgcgctaaaagcgcccgagccggatactttccgctggacaaatggctgttaatatgaattcgtacagtgacattgtcaagttcttcggcacgaatgaatgaaacacccttaggatttctagaactagtagaagatacctggtatttcacacggtcatcgcctttaagtaagcaaattgaacgattaagaatacgacgcaggtttgcattaaattcagagcagaagatttgagcagcgctacggtcatgtctttcttcagttttaaacgcccctgccgcaaagctataacgctgaccgtaaattttagcattgccgatagcaaactttttgagctgtttctctgctgacattgcgcctaaccagcgagaacgacgaatgttttctacaacaaaaccagcataattggcttcatgcgctgccatgctatttagcacacgacgagctacattaccagcaattgctacgttataagcagctggatttaaatcatgtaaagctgccaaaacctttacgtgcttctcacgctttgacaacccctttccattatgcttatcaaattcaccagctacaaacatctttaattcattcttattcattatcttttcctctattttggactgggctcaaagagtatctcaaaatctccctgaacccattatacaacaattattcctcaagcattataactttgcttgggcgcttatagaaagcatgagttttatcatctttagctaattcaaatgtagcagtaaactgtactttgcctctgtattcaaacggaatactttttggaagggaaccgtaaaccgtagctccattctcaagcacaaccatcatcttacattgtacgccgtaatagtcttcataaacttttactgacgttacggtaccagagacagtcactcgtccttccggtgcatcccctttattcttattcagctcattgaatatattatcaaagacctcttttgaatgttcctggatagcctctaagatgctcttatgggctctaacttctgccataacaacatccgttccgtcttgcaatttccactctttatatggaatgcgtacttcaagaggataaccatactcgcgaagttctttgtactccgcttgagttaagcggagtttccaccaaccgtggtcacctgtatactcaggcttatccagcgaatccaattctgtaacatacggcaagtaactgcctgcgtgataagcttcaacttcacctaattcattttcccaaagataaccatcaaagggagcatgagggcgatcatctttgccccaagtaggagctacaactttatcaaagtattcacgaccgaagcgggtcttcgcccatccagcattcaactcctcggcgcgtttttcaactttcgctcggtgtgcttggcgggctacacgattttcttcaacaagtgcagagataatctcggttaaagttttcattttattctccagtttggttgacgagaccatcttatcaacagcctcgccgaaagtaaactactttgtgaaaaattttctccaaagcataactgcgtctctacgagatacttctactgctcctagagcaatcgcttgcttacgacgaacatctcgtaaatcataatgtggaactcgcttatcttggaaccaagaacgcttcattccgatagcttctgccatagcgtgtaactcatcaaggttgtcgctaaacatatgacagttctttacttgatgacctctcattttccaaccatgattcatcaagacatctacgtatactgtcatttctgattctcgatgtaggtttcaatgatgaactgtgctaaacacagaagattatcttctgaaggagaatctactaaattctcaaccatttcagaaatagttccaaaagcttcttcagtattgaacatttcttgaagttcgttccaagtaggtgctttcatttcaatctcctcattagttaacgaagctatcttatcatggcttttctaagatgtaaacaacaaaagggcccgaaggcccttaaaaagatcggaaatcactgttaaaccatggcgactggtgttgtcgccgcttaagcaatttcagttggtatttcctattgtcttctataatcatcttagaggcttttagctcttcagccaatgagacctgtttacggtccatcaagatgaggttctgggtcttctgggcaaacgtctgaatacctttgagacattccacagattcctccatccctcgtttatacttggttcgggcagcatttaactgcccttcgtaatacgcatgtatagacactatagtactaaacaccttttacctcaataacatctaagataatatcttcaacgtcttgctcagggaatgtcacgccattggtctgcccatgctgaaatactgcttggtacgctgacggcgcagaaattcgggttgaacgttctttattgtcatagcatttgccatcaataaagcgtttaaatttaacttcataggtttttaacattattacaccttagcataattgacaatttgttcacggtcagcaggccaattcaaatcagagcgctttttgtttgaccacgcaatattttcttcagcccaatgaagtttagccgatacgctcttttgtacttctctgatggcttcttcaagataaatgcctaaatctctcgggttagttccttgagttttaaatgcattgagcaaaatatttcttacaacttctttaaattgattttcaacttccgggtgaataaattcacgatatccgttgcacggatatccaaaagcatctaccatacgagtagtactaaattctttgttcataatccgagagcctcgcgttcatcaggatttaatttagccaaagcggcttctttaattttttccaaccgtttacgcttagcttcaggtgtttcttcctggacggtgatagcagcctttttagggaatgtccatgattcaccattttcatcggtgaatgtaattagttctgttggcttacgattaactgtaccatctgagccccaccaagactgccccttgactgcttcttcggcaacgcaatatgaaccataataaccaaacaactcactacggcgatcgtctggtgaaacatacgctgcataggcttcactttctgtcattacccatttcattttagcacctcataacgaataagttcaatacgatttttaagctcttggtatgatttacgccaaggcttataataagcatttaaatcttggtgctgtttatgcatttcgtctaaatgctttactgcatcctgcacatttacaaggaaagtatcaaataccttattagcgtattctttcctgagctcaatgaatggaggagcacgaaatacatttaccattacacgcagttcatgataagaagaatggacttcagctaatacatttttcttatcgccaaaattaaacttataaagtttttcacagattgcttcacaggctttctctgctttacccttaggtttacctgcaaagatgtgtcctggcggatatactttaatattgtttaaccaacattcaatatctttaatagctgctaaactcattgtacccacgctccattttcatcaatgtaattaatccactcgttaatagtccaggaagaggtatcacctttaggagtatcagcgatatacattccgcctttaaacaaaacacgttttacatcattagaaattaaagtagccattatattttcctcagttagggaggatttctcctcccgtttaaattatttcagcattgttacttcagcaatttcacgccagtttttacggtcagtcgcgacgaaatcaccaatataaagagcagtacggagagatacgttacgcagacggtttacgttatctttcataaattccaaaacttcaataacttcagaatttcttaacccacggttctgtaacatagaagtagtcattattacatcttgaactcggaccataatctcttcattagtgtgaacaccaaggtcaagataaacagagcgtgataccagagcttgaagatgcggagcaagtttagaaccgcgctctaattcacggtcaatatcaacgttagtgataaagaccacagtaccttcaaactcaaactcattaggaattcctttatcctccaagaaagaagatgcagtactccagcatactttacgtttctcccctgaatctaaagcagctttcagaaggttaagaatgtccatatcagagaatacatctacatcatcaatgagcagaactgaatttgcttcacgtgattcccaaagacggcagtataaaccaattcctgagattttaccgttcactgatttataatcaatagcgttagtatcatgagcatgttgtaatgctttgtccaaagagtacgtcttaccgatacctgctgctccggagataatcagagaacgaatattcccatgaattaaaccgttagtcattaatcccataacgttaaagcgtttcttgatacgctctttcatttcatcaacggattcaacaacttcaattttagcagctactccgtcaattgtgatatcatctttgaatacccaaacaccacgctttttgccgttcagttcaacaaagactttaccatcaccctggcgagaatcttcagcacttaagctatccgggaaccactcaccgagtaactcatacgtacctgaaatctctttgccgaagtaaatccctttcttgatggtgatagttgacattttattctccgttactctgttttgttttgatggagctatagtatcattctacacctccaaagtaaactactttttaattatttttctaaaatttcattgatatagtaaggacggacctttgagttaagatagaagtcatctacaaaatcaatcaagttgtcagtttcaccacggatgatagcaagtttagagaacgcttctcctaccatcattggttcaaattctacgccgtgagcctcagcagctttaaaggctttatcaatgttgtttacgacgatttctaaagttttcattttattctccgttatctgtttgggtggtacaggtctatagtatcaccagctcgcgagcttgtatactactttatgtattcttttgaaacaaaaagaggagcccgaaggctcctcagttatgcgtgcttgttgatagcattttctgcgatacgctttggaagtttacctgcccagcggaagaacatgataatcgctccggcaataaacgcagggaaccaaaagatgagataaaaccaatactctcctgctttctcgatggttccatttttgattagatgcttacaaacagaccaacccacgataaagtaaattattgcaacaacgattggcactactatgctccaaagtaaaatcatatttcagcccagtaaagtgataaccggagagtttctccggcccatgacataaaacgatgtacttgttttcgagtaggtcgagcagagaacttagcattctctctacgaccagtctctctacaaactgcttccaagtaccaccgtctacctttatgaggtcttccataattcaagaagaccttcattgtatcatttgtagtaagaattgtggttttcaagataaaccttctcgacgaaatcgtcccagaatttcatgtctactttcttaggcattccattcttttcggcttgatgagcaagacgctctactgcgtcaacggtcgtttccaaaatatcctgaacttctttgaacggtaactcaccagctttgattttcttaatcaagggagcctgtgtcagaggatatttaaggtcaccggtggaatagatttcttgcaactgaagaccaccacgaagggcatgactcaatgctttccaatctacaccttcattggcttctgccttacgagcacgttcgccatattcagcatcaagcttctcaagggagtacttcatttccttaaccgtgatagttgtctggaatttacgacctaacacattatagaaatactgctgacctgatttatggtctgtaaaggttgtccactcaaggaattcacctaccggaagacgatcggcgatgtccttaactttccaacgatcgttaatgcctttctgcttaggacgatcgtcatatttccattcaggaacatctcggataacatccaggactttatgcaaatcagctaaacgagaacccttaacgccatacttaccagcctgcttacggacatatccaagataagccttcatgtccgtggtatagaaacgagctcggttgtcttgaatgaatttccatacttcaggaaggtcagatgcaactaccaattccggcggagtatgcagcatgtcaagtgcaactgtttcaccgtcagcagcgagtttgaagaagtatttcaaactgaacagctcatggtcaatgtcatctttagtatttttggttgcactgttattcgtattacgattagtatgattcatcgcctgacacattagaatatcacgcggatgaggaacaaagatttctttgaaatccacatctgattcaggagttgaagtaccgtatagatgcgaaccaaaataagattttacgattgttttcataagtagatatgattccctttagcgaatttaactaatgcattagaacgcttgacggcttcttctgctcgagttttatcagtagttctttttgatgtacggtaaacattaccaattttttgactagtgtaataatacactacttcacatgtatggtactcttgtccatcaggatgctgctcacgacaggtttcttcacgcagtgtggtttcatacataggaactaatgcccaatcaattcctgtgctaatgattgccacctggatgtcaagtctgttccagcgaaacgcattgatatatcctaggacccgtgattctgggtccatcattgcgaatttaatgttttcggctgaagccagaggcatttgtttcacaatgctcatactaagttttttcttagtagttacgagttcaatttccatgacccgccctcataatatatgtctaaatcaatgttatctttgccgctgtacttgccagtcaaaggaataaatttaaccgtaatcttttcgccgtcatcaaaagtaaattcggcaatagggtatgtagaaattataccacgttcggttttagcacgaaatacggcccgaaggccgttcacaatataaacttgatcattcttcactagttttaccttctacataatcaatcattgggcagactttccgcttgcgagcttttaaatactggacgaataccgacggttcagcttctgccggaagacccgcttttactcgagcaagttttttggtatactgtttctgattgcgatagcgtttaaatttttctaaaccaaaaataaatccaaacgctatagctgcaaataaaagcacaaatgctgctataaccactgcgccaactggtactgctataacatttaaccaaaacgtggataaactaatacctatccaagcgagaattcctgtatctgccacaatcggccaaccgaacatccatgcaacagaaccgatgaatgtgataatcgctgaagagaatagaacatgaagtactgttgtccagaagtatccacatagagtttttggcattttccacatgttgtcagatttaaaccacaggttcattttgaaatgccaagagtttttattaatattcattatcagtccttcatagttggaatcattgcggtaagatatttgaccagttcaatagcgtcgcttttatcaatagctacacaatctccgtcacgttcaatttcgatgatagtattatgttcatacgtgtggaataccgtaagatacaaatcaataacatgcgggctttcatcttcaattactgcatcgcctttacgggattttccgtcccatactaatttactcgccatcttttgcctctatcaagaattgaattaatgaatcaatttgtttagtatcaagatgaattatatcattgccttgttttagcacgatacgactcaactttttagtgaaatacgaattcacaacctttacatgcacatcgctgtacggattatctaaattggtactatcaagaatactttccataattacctcaattgtgaatcttttgaaccgcgacgattataggcagaagtcattactgtatcccactttccttgacattctacgcaccgttgacagcctttaaccaacagacgacgagctactgggatttcctcatcacaatcaacacagaactcttcggattcccgctgttcttggagttgtttctgaagacgggcccattcaatcccgtcagctattgtagcttcacgagttgcaaatccgtcatctgatggaccccatccattcatttcaaactctccagaatcatttgcaccaaattatatgtaaacatcggatgctggtattgtaccacaatatagatgataagtaaaacgtttctcattcttcgccatcatcaaagtcgtagtaataataatcacaactgtcaagataagaatccataaattcttgttgacggcggaaatcttcagaaggggtcagtctgtctgcatatgcttgatcatctggatcgctgaacttatcttcttgcaattctttaatgaactgttcagcttcttcacgtgtccaaaacccacgattaagattatgaaccgaacgtttttcacctggcttgaatacgcccatatcatgtgcagaacgctcagttgaatagctttcagtttggccagcatagttttcatattcacaaatcaccttgaagaaaggagattttcgcgaatacacaccacgaagaccgagttcaacatcatacgtgcctgatgcaacaatgtaacgcgttatttcgccgcttttagtttctgtgcgattaacaccacacacgtgataaaagatttttccaggttgaagctcggtagttaacttaatcataatgtttttctcgtttggttgttgatatgtttataatatcatgtaatgaagggaagtaaacaactttttgaaaagaaaatgcctcccgaaggaggcggagggtattactgcaatgataacaaatacttagtcttgtagcatagacctgtaatgtcatccagaacactttggagggcggcaggaactgacttgtagataccatcggccttagctagaatgaggtctagcatttcaacggtgtcctttggcagctctttctgtgatggtaaagccggtgtataactcttacctgagaatcctaaccactgctcaccaaaagcatctatcaaatctggaatctcgttaaagaaaacttcatacgctttatgtctggcatacgatttggtatcaaaatgcgctgaatgaaaatacgcctgagacgccataagtaaaccgatgaattcatcttgcggagtaagtttaccgtcctttacaaaatcattgaacttcattatcgagttgtatcctcatacggttagcgtattcttcacctgctgaacgtcctaaagaatcgcaatctttagaacaagactcgctcttccatttactttgtacgaaagcatagaactgttcagactcttgcttactaggctccttaaatttagcataaacttgtagagctccctcaacatacgaattataatctgaaatgtcgtcgtgtgatgcagctgggaatgaaatcccgcagcccaacaccagggctaagcaaatgtgattaaaggccatacggcctcctattatttttgtccagtattacgtttgtgctgaagtacagccttaacttctttgaggtatttttccagcttacgtttacgggtataatctgcttttgaactatgttgacgaatttcttcctgaaggtgcgaaataccatgcccaatctcacgacgaagttcgtccagttgttctacagtaagattacgaagttgcttttcacttaaatgctgcatatacacctcatcagttagtaatagtatttatataagtatgtgttacttaatcccaaagccattcgcagatgccttgctcaatggttctagcacctgcttcgtcccagttatattcttcatcatacttcaatgcacgtttaatttcggctttatgaaataaacgcggaaccggcattgcataacgggtccaacgtagagttttccagaatccatcgcgctttgatttagcaatcagtttcttggcctctagcggtctttcccgattttcagaaatacgcagttcaacatatttctgttgggtttctttatctttctgagttttaacgtattcgttatagcttttaatataagcaaattcgttattattctgatcgttccatttggaagattttactacatgccagcctttacggcgaattgttctagacattattacctcgttaagttaaagtacctcaacgatagtaaaatcctgatttgaaaaatttaatattcatgaatagattaccttacatttacatttggggcattcaggttctttattcttaagacgcttggtagctgtctttggagcagtgttgtaatcatatacatgaagacaacggtagcacatcacatattttttcatattaaaccatcaacgaaagcaatattacgtacatcaagaatccaattatgagtactagtactataccacttgctatggcaaataagctactcatgtttaatataacacccattcatattagcaataaagtctttaccctgtgccaatactttacattcggaattaagacgattttgtgcttcttctcgtctatcactttgtatagatgctgctacaccaatccaaatgaatagcatacccataattagcatcaggatagtgttatacgttcttggcttcattataaacacctaccagttcgcaccagtgtttacgacaaagagaaacgtatttgtcttcaccaccaagttctactacttcaccatcggtaatagcatttccgttttcgtcaatacgagctaccattgtagccttacgtccacagtggcaaacgcccttgagctcaacaagtttatcggctacagaaagaagagctttagaaccttcgaataactcgccgcgaaaatcagtgcgaagaccatacgccattaccggaacatcatacaagtcaacgattttacatagctgaagaacatgttcagcagtcaagaattgtgcttcatctacaaatacacaatgaatatcacgttgtgtttgtgcccacttgaaaaattcaagtatgtcaatagattcgtctactgtattagcttcatgacgtagaccaatacgtgatgttacctcggtggcagaatctcgagtatcaatggcaggtttaagaatgagagttcccattcctcgttctttgtaattatgagctgctgtaagaaggttagccgatttgcctgcattcatgctcgcgtagttgaaataaagctgtgccattaaagtgtctccataaaatcagaaatagcattcttagaacgaatgagttcatcgtattcttcaggtagaccatttccgtaaatggcactaatagctactacttgctcagcacctgcataatcgtcaatcaactgccacagtttagttttttgctcttcagtaatcatctatttacctctaacaaaacagatttagcttttagcctcttcatattctaccaccataatgtcaatatcaggggttgctaaattaataagtttctcaattagttcccaatcaccgccagcaataccggctccaatttttggaatgtatagaggacgattataaacaacacgaccagaatttagctcatggaatgcattaaaaattgcgccgtaatcaacatttggacctggcgcatactgggtgtatagattatagcaatatgcagtgccttttttgtgaatggctcgagtatgagttccaagcttagctaaattgttgtcataataacggtcttcatcgatgtcaatatcgagaattggaggatatgctttagcaagttgtcctgctacaccagcacccattgtagtaaagcaattacacccatgagcgatatcgcactcatgcttcatgaataattctacaatattacccttaatatatccagtaatcatttattcacctatggaattttatatgttgcatattcattaagattattgtatactcttaaaaatatagcattgttacaattaaggatagggttcagcactccttgttctttaggatgcattactccatcaacagaaatgccgtcactctgcattccacatccgcgagcattatactcaacatgtggaactatcacctggtcatctttatcttgataattataaaatgacattagcaattttctactactaggcacaaatgctatttcaatgttgttcttgaatgggccattactttctattttagtaccctgtgctgcaagtacagtttcaggatagcctgggagcttttcccaggcattaactgaaaatgcacagcataataaaatagctgcttttttcattttgacgatagtcctgacatataacgagccattaattggtcacgatacattaaacatatattttcgttaggagcattgacacataaatctttcatgctgttagccttgcgatttattagtgtcgtccattttgccgggctgcgtgaatcttttactccatcgctgaatgctgaatctaattcaagcgctaatatatcaacacattcagaattcgtattacaaaatgttttagcaatacgaagtgaatccgacattgaattttcagcattaacagagaatgccaatactaatccaagaagcgcggcgtactttatcattattccacctttatatgtagcattttatgtttctttaagaaatgagctttctctaggacatctgacgcataagagtttcctcttttgacattccatcctgcgttataactagcaagagcttttcgcatgttgccgttatgtatatttaaccaatatgaaagctcaatatatgcccactccgcagaattccgtctggatttaagcatttttcttatttcagaatcactaaggtttttaccttccagtttagctctggccttaacggtgggtaagtaattttgaaaaaccccataagaatgatgcccctttcctgcttttaaattggctcctgccgaagattctttccatgatatagcagccattatatatcctaagccgttattatcgtatcggttatgcggagatttttcctttccggatttttgatattgttcaccaaaattatatgcgtaatgcaagttgtcaagttgaacattactgaaagttggctcagacccaaaggccgttgaacataaggccattagaccgataagcgcttttttcatgtttacctcaattaatgtgtataacttttgtgctgattttacctttcaaacgtttatcattaacgaatgccatacgacactttatactaggtccttttcctggtcttggaatatccatggtaaatcctagccacagatttccatccgtaatttctaaccgcattggcttatactcgatgttttcatcaatgtcctttgggtcaattggaagccaaggcattgctaagaattcattaatttctttaagatgattaggaattttggaaagaacagagaatacatactcttcatcaatttcacgttggatagcacggtccaacaaatgatcagagtacttagtgaagaaaggctctttaccctcagccttagctcgggcacgaactgataaattcaaagagcgaaaagcttcctcaaacttacgacgcagtttagttctgcgaatgaatacttctgggttagttgacatagttcattctcctttgtgtgtagggccatagtatcatggcccgtaaggaaagtaaactactttttaatatttttcttctggacagaacactgcacggcaagcccacatagaagcttccttcagtttctgttttgctgtacgaatctgggcaatacgctcgtatgcttcatcgagtacctgcttaggttcattggctgacacttggtaattaattaatgcctcttcttcaagagcagtaaagataagaccaagacgggtctcagcgtctttgatagcattcactttaccaattttttcattggtatgtggcttgtatcctttaatatcttcgattgacattatagtgcctctgtgaaagtacgagcgataacgtcgcgctgctgttcaggcgtcagggagttgaagcgtaccgcgtagccggaaacacgaatggtcagctgcggatatttttccggatgctcaaccgcgtccagcagggtttcgcgacgcagcacgttaacgttcaggtgctgaccgccttcaatttttaccgctggctggtattcaatttctacttcacgagccttgtagccataaaaagtttcagcatccgtaatagtatcttctttaagaacttttgaaacgattactcgtgcgtcatcaccgtcttcgatgtaaatggtgcctttaagttcaccttcaagaatttgatatgctttcatatttcctcttaattagattctttattccaaccatgcatatatgcagtaactacactcattttattccactcaagtagaattactgaaccaatcgcagaagctttcaactaaatgtggaggacaccttataacaatttcagccattgcattgttttctcttgaatgcgttggtcatatgtgattaagcttgaactaatcacgcctttgagcttgccagatataaactcaattctaaaattaggatagcgattcatccacttcgtgttaggagcgttagaaatgaattctgcacctttaaacggaccagacagaaacttgtagcgcttgtactcaagcaggttgccagccgtaaccattgttattaattgcttcatatcggcaaatcctgtattttccatcactgtaatcatatcaacaatttctgtctgtgtcatcattgcattcctatcacgaaaaataaaggtaaggtatcattaggcatagaccatctgatagcttcctggtacatatcatagaacttcatcatatcgggaactttcattggttcttcaatgataattaatgctcttccaaactttcttcctctaaacttgtaagaggaatcattggatagaaattccctgattgtcatcggaacaattgatttagctatctcgttagccggtaatttattaattaaatgtgatgaattatattctcgtagaatataattcatcagttcagatgattgtgtgtatcgagtagataagattataaccgaaccatcttcaagcaaccaatcggtagcgaattggcataaggctgcggtctttccggtttgtcttccaccgtctagacgaagggtaccgtactctcgcataaggcaagacggttcataaaaactgtagttgggattattcaatcgtctgtctgcagcgtctctgaaagcatgcatcagggtcaaataaatgggagttaagtgtttcattttagattccagttaaaggggccattccttggcacatgtttaatccatcgacacactatgtaaaccccttaccgcacttgcgctcgaccttattacaggtagggaaagctacttcactcagaggactcgacgttcatgaggagaggtcgtgttcagctttattaggaattagttttaattacgggctgcattagcaacggcgtaagcgtattgaacattagcgtctttaaacgtacctttagaggtatctaaatctgctttaaatccgcctttagccataacctcggcgaattctttacggaaagccattgcatcaagacctttccaggctgatttgtgcttggcaaattcacgaccagcgaagttgacagccttagccaatttattatcaataacccatttaccagctttaggcacaaacaccgggcctttctgcttagagaatagttttaaattccagcggcgaaggtctccatcggctttaacaaaatctgcgtccaagttactagcaacaacatcttgaatatggccaaatttaagtccatcagcttcaatatttaggtcgttacgccagcgaagtccttcccaggcgaaggctttaaagtcagaagcctttgtagctaaatatcgctcaataggagctgttttagggtcaaagccgtttcctcggtaggtccactcatctttattaatgccttggacctttcctacagaagcttcggtgataaattctttataggttttcattttatatcctttaagttaatgcgtgtcattttagtgttctctatgtttgtatgagaacactatatcacaactatcgtaaaagtaaactacttaattgatttagcgtaacgaatagcgccgcgatcgtttacgaacgcaatcttgccattacgcatgtacatggtaacagtacgttggtaaccgttagaagttttgccagactgataacctactaatgcaaagttatcttcaccaggtttgttctgcttagacttaatacgctcatgaccaagtgccattaaggagcgtgcatcgccagatgctactgccttacgagaagattcatcttcaaccgaagagacaaaatcatcgaatgaatcaaacttggcatggctcttattatataacttgccgtctactacgtagttatatccaacaacgtccatttcaatttctgtaccatcttctaacgtggcggtcatcttctgaccttttttaaatttcagaagattacttccaacagattcagtcattacgccaactgttgctaaacgggattcatttaaaaattcttgataggttttcatttattttccttgataagcggcccaagttccggtccgcatagtttcaattacacgacgagcacgattaggtgtctgacgataccaacgtgaatttgccagttctttggcagcagcatcccattttttagcgagtaataacttcattgaagctgggaacccggctacaccagacacacccatttggaataccatgttaattagagctgctctacgaacatcatctaatacattatataccgggtttaatgtagcattagcaacaatacctttaattgccttctcaacatctttggcaaaaattacttctgcctcagcctgagtaatttgtccacctgtagaacgacctactagcttgtccaggttagaaatagctaaagattttgacgggtctttagtcagtaagtggccaataccaatggtccaatacccttcggtatctttataaattttgctgtcatatccttcatcgatacgcaacatgccaaaaatatccataaggacctcctattaaattataggagtatttatttggccctacacttggctataaacatctcaatgctgcaatcttcatacggcgtccatttacctttccaccatacataatctcttttatcgtcctcgggcaattcactaaatcccggatatagctgttctgctatataatatgctgattttgtatactcgccgtcaccgaagacatatcgtgatttcaatagtatacgcgacattttatctctaggatgaaatatgctaacccattttccatcgtgaataaatcgtagctcatgcttataaatgtgtggaatgcctaattcaacggcttcttccatagtaacctcactgggctgtgctatacatctgtgtcatgattttatacaaacttggtcccatcacatatttccattgagaaggtttaattaaagcaaatgcgtcgatttccgggaaagaaattccattttcatctttatggtaagctgtgcaacagcaattcttaaacacttctgggctcacagggagcatatatccaaacaaatggatatccttattgctgtcataatcatgtcgtccgaggtcatataagaggtcctggtcaaacccagtaaaccctgtttcttcctggcattcacgaatagcagcttctttcggtgtttcaccaggttcaacatgtcctttcggaatatcccatctagagcctctgccctggacatatgtatttgtcatacgacccatgaaaagccgtttgtcatcggtaaagaataagattcctgcactgagttctttcattggcattcattccaactttcttcaagaatatcttccatggcagtatagaccatagactctagtacaccatcacaattatatgaaccctctaccgagaaatcacagataggtccattaataccaagtagttcttctttaagtgaaatctcgataccgctcagtgattcgttatcactgtaacacagaaggcgagtatcaccgttttcaaattttacatgcactgcaacagccattatttcatctccttaatccaggacaaagtttcattacgagaatcatctttagatttttctttctttactttgggtttatcaaatacaccccgctgccgctgggaaacgaattgcaaccaacgagcaagcattgcaaaccaagttccaacacctgacatccaacctaaatagaacaaagtatctccaaagattggtgaaaagaagtaaaaaccccaaaaagtcccaaatccaacaaaagctgaaaatgaaaaccagataagcagaaataggaaaaaatacccaggctcatcgtctttaatcattccacggtaacaagttttaatcattttctgcagctcctaatccaggtgttgaaatcttctttttctttccacttcttgtatttcatacggtaagctaaaaatgtgcagcaattaatcaacgcaataattagcatccacatgaggctgaatgcgaaaacacctaaaaataaaagcataatcataaactctgagacgttcaatccaaagaatgtccctccaacaattacaaaagcacaatataaaatccatgtcacgattccaaaagctggcgccagcccatcttggttccaaaacccgtcaggtttacattcattcattttcttctcacctctttaataaactcaaacgactttttgcggttccattcaagagttaaattcttgcactgttctttccattcagcctttcgttcacagttatgcttaacatactttacccaacgaaatagttcaattaatcctagaccaagtaaacctattaatccccatgtaagtaatattacattcactaatgatgtactgctaatttcagccaaattcattacgtcgattatgataagcgttatcatagttccagcagcacagaccatccccggaattagaacataatcagtttggtcaaatttatagacataattataaacgggaggttcgcttggcagatataagttactcatttctgcaccctctcacggcagtatttgataaattcatcaatgattaattgtttgcctaccatgttgttagagtcaaacatactcataacctttggtggcaattcattaatgcagtaatttaagtaattgatgtaatcatctttagatgtcacatatttaactaggttaatgccaagacgatagctatttttattatgaataatctcaataactatggtgtacgttgttgaaccagaggtagaatatccatcggcattagcacgggctgatgttagatttgatggagaatcgttgaaagaataaattccgtaccgaagtgcaaagatatctacaagcttaactccatcggaaatagacgaaatgctagaaattaagtttttcagcttggaatagtctttaagaacgatagctcgaggcaaaactgtagtgttatacccgttatagcgagttttccaattctcaggccgagtatcaagacaagcaaatttctcgagaatatcagtgatttcttttgggaatcctgctgcaattaattctttaatttgaggtgttgccattggaatatctccagcgcattcatataacattttattatccaaataggggcccgaaggccccggtagattatttcagagagttcagatattcctgaacgtcggcagaggtggtctcgataccaggctgactaccgttgaaggtttcaactttcatcatgatatcttgtacatcaaccttagcgagttcagcgatttcaatcacatcatcggcagaggtaatacccagcgcgtttgcattacgagtttcacggatgtattccagtttaactgcaaggtcaagacgctgttcgtcgagcttaactacagtttgctcaatttgtgcacgcatttctttatattcagcggctttggcgcggagagcagttgcggtacggcgatacagaagaccaagcttagctaaagtttcaaccggagcaccttctgcaagaagacgacgaatttcacgctctttagaagcaccagcctggtctttttcgtcggcaagtttcagcagacgtttttcttcatttactgatttaacatgcgtggtacgcagtttagtaatttcatcaataatacggtttgctgccatcgtatactggtcttcaatagaggtattccgtgcaacaaaggtaccaaatttagaacggatgaattcaacaagttttttcagaatagacattttatttcctcagtaggtagggagttcattataactccccaaaattattagcagttaattactgcttcaattcgtttggttaaagcactagcagtttttgcgaatttaatttgaacagtttcggtaggagcttcttcatggtaaactcgaacgtagtactcttcaacagcaggccaatctttacgaacatgcttaatcaaatctttaagttcacgagtttctgctacattgaacactgcgtgttcatgttcacctttaatccaaatcgcgcgataacgatcaggagtaccgtaattgttataaccacgttcaatttggataaagttgaatttagacattttattctccgttactctgttttgttttgatgtagctatagtaaccgagttgactagcgttgtaaacaactttatgcacaaattttcaaataattttagggaatctggaaggactttctggagggtagaatggatttatacagcttggtatatagaaatgcccagacgacctctagaaggtatctgggctataattgcggtattatcatatactaaaaagccccgtccgaagacagggctctgagaatcgacagcatcacctactggcagatgacctgctaaattcattcctttgaactcggaggcatcagtctcatccaaaggagtatagcgtcaggaggttatgcttgcgacagggaacaaccgactagcggcaatggacgaaccattctcttctatctgacgactcaacgagggcatacgcaagtttcccttcgaatttggtgccgattgcaggagtcgaacccgcgacatcttcattacaagtgaagcgctctaccagctgagctaaatcgacataagacggaaataaggattcgaaccttatgtagttgcacagacgtatctgccgttgaattcctcactaagtttaagcaactattccggggtcttaatttggtgcaccgagagggattcgaaccctcaatccttgcggcgggagattttaagtctcctgtgtataccagttccaccatcgatgcgaaatggtcgaggcagaaggattcgaaccttcgacccacagtttagaagactgttgcttctatccactgagctatgccccgagattgttcaggcaggactcgaacctgcacgcttaggtctgttgcaccggtttccgccttactgactcgggtaccaaccgagggttcaaacaagctattccggtcgtgtctaccgatttcaccactgaacaagataattatattactgattatttatagcatttctcaaacgataaagttggttgcagaattcacgttcagtcaaaatcgtttcagaaattttatttttgcccatgctgtgagtgagcgtagcattcctggtagcagccaaagcttttctgaatccttcatttttactaagtgcatcgtatgctcctgttagtaaattctgatacgcttctgaggcacggtgaataggaacacctttccaataaagcgtttgtgttggccaccaacgtttcttcttacctttgaacttagcggattttccgactagtgtacatacatgtgcttgcatttcaggcgaagaaaatttgagggattgcaagaatccctccattgaggcacattctacgccatcatagataaatttatgaggagcaaagttgctcaaagcacatgatggatatgaactacctgaaccaatatccattacttttccttcacgtatttcaaccaatcaacttttaatgggctttctttctgcttatacgtaattccaacatggaatgcaaccggagcgtcaggaatacgaatttcttcttcaatgttgaagatttctactttctcaaatactcgcatgaaatcatagtcatattcaattggattacccaaccaagcctgaatagcatacataacttcatttgaacaagaatagtggttatctaaataagcatcaaactcttcgtctgagcaatcatatgcaggaacatcaacaccaaagaatttcttggaaaattcaggagttacatacttctgttcagtatgaagcttttcaagaattgcttcatggttgtaatcattatttccaagacattcaccgcggcggccacgagaagagaaccattcaagaacatgaattacttgattaatctcttctttttctaagccataaaccatttgggtagaataccgatcagcatcgttttcccaagtggtaattgccattgctaagcctttaggaataacttgtccaaatttaatatgcattttaatttcctcagttgataatttggtgaccctggcaaagactcgaacatgcaaccaatcccttatgaggggaacgctctaccaattgagctacagggcctttatagaaatcttatgacttttataaaagccctccgaagagggcgcctgtcgggcttatccacctgctaggcagaattactcacacataaaatcagctacttcccagaagtcattttcaactgctactttaactactggagaaatttcagacgttttaatagaaacaattacatcacctgcgacagtttctaccagaccaacaattttctcgctgcgagcaacaaatttactcaccggatgaaatttaccggtagcagcgaacatagcttcttggtcaacaatcagtgcgatacgtttcattctttttccttgtttgttttgatgtagtaataataacaggttattcttgtagcattaaatctcgaaaatcgttccgttttcccacattgttgcgaacataggagaaaccttaacgaatgatttgcttcgcattgcaacgtagtcgttatctactttagccaatcctgaagcaatatcagtaatacggccacacttcatagaaccgcgaccacctttattgtatgtgcgttctccgtagaaaacgatatcaccaacttgtacttctcggcctttagaatctttcatcatattttgcctgctgaattcgtttaaaatcgttaacaagttcttttgggtctgacacattgttaaatggaagaacttgacgtagtttacttactttacaaccagaatgataagcaataacttcttgaatatcacgctcactgaagtattcatatttaatcagtgaatcatatcggcatttaatccagacccacatacctttgcgttcatcaaatgcatatgcaaagtcagcgttaatcattaaatctcgtttagcacaagatgaaagccctaatgctaaattaaccggtccatccaaagacagcttcaccgtaatagcgtttacgtcatttgatacaccaataaaaatattcattctatttccttcgcttgtttttggccttcttgtcgtgcacgagaacgtcctgctttatgcagtgattcgtaatatgctcgacgtctatcaatgttttctgtgcgatatgctttcccgaaatgggatgttttgaagccgtaatatttcataatataattctcaatggcaagtgattggacggtatgcccggcctcgaaccgagtcacattgactttgcagaatccatgtgtttaatatatcacccatactcgatagcatatctgaacgagactgcaatcccgctactcagcttacgccatcttgtattgtgtcataccgttaatttggtctccatagaatgactcgaacattcgacctttccatcccaaatggaacgctctaccagactgagctatacggagtaatttggagcatccagggagaatcgaactcccatcttctgggtggaagccagacataatatccgctatacgatggatgcaaatttggcaggccctgaaggaatcgaaccctcatcactgggtttggagcccagcataatagccgttatactaagaacctgctatttggtgggagtaactggactcgaaccagtcaccgctcgattatcggtcgagagctctaccaaatgagctatattcgcgaaatggaggaagcgatgggattcgaacccatggaccgccttccgacggcctccggttttcaagaccggtgcaataaaccaactctaccacgcttccgtattatttcttaatttttcttccctttctccatccttctggaataaggtcagtttttaaaatctttttactttcaatttcattagtaatccacatggttccaaactgcgaatttttattacccgcttgagctaattttagcttttctgaaatcttatttttagtttcagaagtgtgagattttcctaacatcgaatttataaaatttttaggaatttgtctttcacccgatttatattgttctttcatagattcagaaacctttttagatatttctgaatagtctctgcgtttatttgattcacttacgccagaagaacatatagaagaaaaatctgggctgttacagatgtggtcccaaccgccttcgccgccgagcttaagattatacacattgccctttaaaaattcttcagttacaatctcagcttcctttgcatacatttcttctttggaagaaagctcaaacaagatttctttggaaaaattgtgctcaccatgctttgcaatggcgtttctaattatttttcctgaacccatatatccatcatttttatttgtggttttatgagctccaacataaacagctccattaattaaattagttattttataaatcagataatgcataaattctcctttgttgagtataattatacattgttcctttctgattgtaaacaaaaaggtgaccgatgggagttgaacccatgactacgagaatcacaatctcgagttctaccaactgaactacggccacatcaatattcactccatccatcatgaggacttcatacgaaattaagagaagaatgatcagttcaacccctgtagacgcgttgaatgaatattaatttggctggactatctggattcgaaccagagataccggagtcaaaggccggtgacttaaccgcttgtctatagtccaattatttggaggcggaggcaggactcgaacctgcgcgtgtcgggatatgagcccaacattctaccaactgaagttaccccgcatttatccgggttcttgaagtactaacaagtagcttgatgtagaacacgctaaagatataatcttacgaatatagagcttattccgtgggaacaaacagcttcgtcctcggcattatcttacaggactcaaactcatcttcaagaactgccacgttactttataaacttatttatgaactttctagcttgagtatgactaattccaagtttatttgcaaattttactagtgcaccacgctgtgtaaaatctatagaattatacaggtctattcgcaaagaaatttcgtctgcatttaacttgtgtgcatggttttctgatatttttatttttgtttcatcagaatggttatgtccagtaaaaccagtagatattattcttccgttagcgccagcgtctttagcgttttgcgcattagttgcgcaatagatgttatctaaagaatatggtccaacatctcctttacgacacatgcaatagttatctgatgctctaccccgcaaatgatatttgccagtagctttccaccatgataaccattcatcaaatgtcaatttaaattcaatacctcttgatttggcatgcactttttgcatgcggtacttttcataatctttcatgttgctctcgtatttggcagtgctgacgggtgtcgaacccgcgatctctcccgtgacaggggagtgtcttaaccatctcgactacagcactataattcgctttcagagatactctggcacgatgccgaagcaaaggggaacaggactctcatcaccttggtaccagatgaatcttgtttagcactctgttctaagatgtatcccttgaaagcgaactttcaacgccgtaagaaattataacatgaacaagcattaagcaggatgaaatcatactccttaatacaaacgccatgccagggatttctgtgccgacgatttatcagaacgtcttctgacttcttcatttggcgggccgtgcaggtatcgaacctgcctagtcatttctgacacggattaacagtccgtcgcttaccctctcagccaacgacccgaatttggtagaacgtgagggatttgaacccatcgacatctcgattaaaagtcgagtgctctaaccagctgagctaacgttctatataactatttataaatcttcgtgcttgggtatgcgtaacatttatggctttggcatatctgttaagagctccccattttgtcatgtccattgaattatatacttcaattcgtgaagcaacttcagtgtctgtcagttttgaagcgctattttctgaaatctttttacgagattcttcagtatgatgttttcctttaaaattatcacacttgccgccataaggttttactccatttttaacagcatctcgtgcattatcagcatttgtagcacaaaatacatttgttggagaataaggacctttgtcacctattctgcacatgcagtattcatgacctttacgtccacgctcagataattttccggtagatttccaccattcaatccaagtatcatacgtaaattcccaaggaattccacgatacaatgcattatatctttgttgttcgtatttaattttcataaacactctaaatttggtggggagtaatggagtcgaaccactcgagccttttgagcaacagatttacagtctgtcccgctacccctacggtctaactccccaatgggtaattttatttatactgccctaaaattaatcagagcagttgatagattaataataacaaagaaaacctaaagcatattacacaatcggtgagctctttgatttaaccaggaataccctatgtggtgaatccatatgagagagcaatacccggtgctcaggaattggacttgtatggaaaggaaccacacgataacctttaggagtaaatcctagcaaaataccaacgcttgctgcagaaagtgacccaccacagtagtatgatactaaatcaccaggctggatttcattgtcaagagaatcggttttggtatgtttaggcgtaactaaatcattaggaattggaacgccttgtgcatcatagtattcatgggcaagaatcttataattctcttgatagaaagtattaaatgcagctctgatattcatcacaatttcctcacaattaatctttgtatgcttcagttgaacctttagcaacggtttcaaatcgggaattcagtatctcaaaatagtcctgatacgttccctggagggcttcatagcattcttctaccgtagagtagacacctctaatttggtcagagccaggagcaggataataattagaccaagttaaaagtgcatacattacttacgtttccagctgtagtgagccaaaataagaagcactgcaatagcaagtagtgatgaatgcagtgctgccagtagtgcacctagtcctacacccaaagtaacataatcatacttagttacttcttcacggtgtaaatcatagtttttgatgaaccactgcttaatctttttcatgtgctattttatccattatgaaagaaatgatacccattagaaatgcaacacttaacactgatactgtttcaggaagagacataaaggctgcaccgataatgccaaaacctaacgctcccatgcagatagttgatgcaacatttctaattaattcacaacgtttcattttattctcctcaagttgatagggttatagtatcactactacaacccgttgtaaacaactttgtgaaataaattcctatttcaaatcttctgaccagtccagttttagtggctcttggtactctctatcaagcactaccggcacttgaacttcaccctcgaagtgagctggacctacattgtagctgagagtaatgtgcggtgagtaatctgggaaatcatgagttgctcccagagctcttgcatattggtgacggaattttaagtattctgaatctagtttaagaactagtgtacgtccgtcttgcgtgtcccatacttcaagtttacctgatgtagcaacttcaaaacttcctgaagcacaaacgtatggaacatgaactcttgaatagcatatcgtcgtatgaatcttatgacgaggtacaggattaggaaccttcaactcacgctgaaggtcctcaatagcatcaagagttttctcagagaatttagcagctacatatagaccagtgctaaaatcactgaagttcattaggcatcagcttcttcagtagtttcttctgcgaactgcgcttcgatttttgcaaccaggtcatcaagtttaacctgaccatcttcgctgatttcaacgccggacacagcaatcagcttctgcagtacttcttcatactgtgcacgcagagcagaaaggccttggatagtttcagacaggtcaaatacacgaactttcagagtatcgacttgggcttgcagttgttcagtagtcatttttgaattcctaatatagtgttgatttttgaataaagttcttctagagaaccgtcgttagttattacgatatcgccttcgcgaatcggaagtccacgctctgtgacgtgagtatcttttttagaaccttcttgctcaggacgaactacatgaataactgtagcacccatcgccctggctacatcaagttcatggtcttgacgagtatctggtacaatgaaataatcataatcaccaaaagtatcagccataaccaaagtaaatcgttttacccaatacatgcgatcgagcttatcacagacaatgtcagtcccaagggtctgcatgagacgacgaattgaccatggctcaacaggtttatttattacaactttacggatgacttccatcgtatcaccgtcaagtattttacgcttgctatcataaaccacgccaggtaaaggcaaatcatgatgaacatattcaatggcattcgccataatacgaatcacgtctttagtagacagatttaaatcctgctcacgatcgtaatcaataccttcaatcattgaccgagtaatgcgaggaaactgacgtgatgtatcgcgataccactcagtaagcattgcatcagccaatgcatctttaattggacctgctaactgatgctttgttgcgttatagttatccataatgtagtcagcagttgtatctttgccactacgttttttaccaatcaaaaataaaagcttcaaattattacctcatagaaggatgcattcccataaccttttgctgatactgagattcacgagtatcattgacagaaggtctaccagtaattattataccatctttttcaacttcaatgtatttgtactgcaaagttgctacacataccatggcagggtcagattcttcagttaaagaatactcaatttctgacaaatcacttacccatccaccgatatagcgaatagttaatacgatttctttcttatcgttatcaagcacatgcattaaaactgcgccaggaaatccttcaccgccattattccatccagactttcctcggtcaatgtaattctgacagcttaacatccatttgtacatctgtacccatgaatcaaggttttcgtctactaaaaatctaacaggaacagcgtcaaattcaaaggtagacccaggcaatttagcacggtgcatgccttgtggagaacccacagtatcagtagcaggaatatgaattccaggaactacagctgtttgaagattagccttaaaggcctgagtgaggcccccgtcagggacctctaatataaagttagttgtgttagtttgattaaacagtccagtagacattatgatttccatacagaagtagcagagtagcgtttgcctttcgacatgaactgctgcagtggtaacatgactacattcgcccaatcagccggttttatctcaattaaagcaccctttatattaccaggaatatatgctttaatcattttgtcagcgccagcaaatcctttaacctggctccagtttatctttaatctggtcttattagatatcactggcgtattagcatactgtttcagaagttcttctaaaaactgctgacgagcctttggcggaatgtagtgaaggtttaacccatacatcagtgtggttgtaccttgctttccaagaccaagataaactatcaaaggaaatttatcccagaatggaagagtgtctttgtgcttagcgtcatacatgtaagcatatagctttccaggttgaggcttggttacagaatgaccacgtatatttttctttatagtttctgcaaaccatttagcagatttattgtttactgctgcgccttcattacgaattttatctttgatagaactacggaatgaatttaccatcacaagagcacgctcttgtttggtcattttgttagcaggttttttctgaatttctgccactttaactgcagctttaattcttgacgcatgacgagccattgctttactgaacgtagcaggatttattcctttactttcagcaaatgattttgatgtcatgccttttttacgagcagcagagtattcaactcctaatgctacccattgattttcactacgggatttagctttaggcgattctgcagcttcagtgataaattcaaatatagccatcagcctttccatcctaattttttaagtgaatcttcggtaattaacctaaattctatacccattttactggcagtagcttgagctgctttccacttatcaacgtttacagaccatgtgtaaatttcatcaatgtaccgtttcttcgctgatgtcgtcaactttgtgggtttgaccggaggtctagtttctttcttcggcttaacttcaaaaaagaactgttgaccattagaaaacttagcccagaaatccatgaaataccggcgtttctttccatcagcattgctgaagtatggaatgactacctcttcgctgttccattgaactacatctggatgattgtcaagccatctcatcatgtactgttcccacgtagaacgataagtaatctttctgaagtcgcctttatatttgtggagattctgcggcatgaatttgccggaatatgccatagtggcctccttataaatactgttattaatatttataagaggataaact

SEQ ID NO: 35 - DNA, 48685 bp, unidentified
  source 1..48685: mol_type = genomic DNA
atgtctgaagaacgtagaaaacgcgtaacgaaatcgcactttgaggggaacttcaaagcgctatatgaaaaggagttcggcgtggtgctagggcgcacagcagagatgacgccggaacaattttttgatatcgcaaagcgttacttccagtgggccgaagagaacgcaatcaaggctgcggaaacggcaacgtttcagggcgacgttaacgagtggggagtgaacaagcctcgcatttttacgatcacagggttaagcctgttttgcggcgtgaaccagtcaacgcttgggcgataccgtcacgaccccaactatgctcccgttatggagttcatcgactccgtgatttatgagcagaaatttcagcttgctgccgtcggcatgattaacgcttctttcgtcggtaaagagatggggatcgataagccgccagtgctgaacatcgacgctatcgccggggataagaacgagatcaccgaagagcggttagagcaggcagtgaccaatattcttgataagctataagggtcagatatgaacgaaatgatcatttgggaagacctgtcgccagccgataagctggcaattaaggcgctgagtacgcgcaacttttcgctattcctgaagatttggttccagatcatccagggcgaaaagctaatgtggaactggcatcactcatacttttgccacacggttgatgaaattatcgccgggaagcgaaagagcacgatcgttaacgttgcgccaggctccacgaagacggaggtgttttcaatccacctcgcgccgtatgcgtatctcaagtgccggaaggttcgcaaccttcagatctcgcagggtgatgcgctttcaaaaggcaactcggatcgcgtgattaagatcttctcatcaagcgagtggcaggagctatggccatcaaagttcgggcgcaagcagatcgatgaatttcaggtcatggacgataacgaccgcgtaaggctggaaatggtctcccgttcgtccggcggccagatcgtcggtaagcgtggagggtacatgacgccggggtttagcggccttatcgcgctggatgatatcgacaagccggatgatatgttctcgaaggtgaagcgtgagaaaaaccacgtactactgaagaacaccattcgatcccgtcgagcgaagaagaagaagggcgacgaaacgccaatcctttccgtgcagcagcgattgcacgcgcaggatgccacctggttcatgatgagcggagggatggccatcgacttcgatcgcattgttattccggcgatggtaacgcgggaatatggcgaatcactccctgactggttgcgacctgagttcgagcgcgacgtgctttccggcccgtcggtggtcattgacggcgtggaatactggtcattttgggaggagaacgaatcgatcgagaacctggttgcgctacgcgaagccgatctttatacgttcctttcgcagtatcagcaggagccaatcgccctgggtggtaacgtgttcaagtcggagtggtggcgctattacggcgattccgacaaggcgcacgagccgcgcccggacaagttcgaatatacgttcatcacggcggacaccgcgcagaaggtcaaggagctaaacgactactccgtaatgtgctattggggcaagtaccgggatcgcgtctacttcattgacggaattcgcggaaaatgggaagcgccagatctccgcgttcaggccgaagcattcatcaagcagtgctggcgtcggaacaaggagtgtggaaaccttcgccggatctacatcgaagacaaggcgagcggtacgggtctaatccaggatctgaccaaagcagttaatggtatgggtgagatcgtcccggttcagcgtgacaaagataaggtgactcgcgcgatggatgcgcagccaattatcaagggtggccgcgtcgtactgccggacagccatccgttcattgcggagcttgtggcggaaatgagcgcgtttacctatgacgattcacatccccacgatgacatttgcgataacgtatttgacgccgcgaacctggaaatgaacctgagcgatgacccggtagagcgaatgaaacgcctggcaggattgaaaaagctgggccgctaatacataatgtgggcttaacggcccacaaatcacacaaggttaaaatatgaaagctatcaagatggatgactacaatcagatcttcaatggtggcgcggggtacgcgtcaaccacggcgatgattgcaagcacgttagggaatatgtcgcaaatcgaggagttctatcacaataacggactggcgaaaaagattgttgacgtgatcccggaagaaatggtgtcgcccggcttccagcttaacggcgtctccgataacactaaattccagtcagagtgggacggccttaaacttgagccgcaaatcaccgatgccctctgctgggcgcgcctgtatggtggctcttacgtcctggcgatggttaacgatggccgcatgctgacttcagccgcgaagcgcggtaagccactggaatcaattgtcgtttacgactacgattcggtgtccgtagcggaggaggagaagaacccacgaagcccacgattcggcaagcctaaaatgtacgaggtgaagccgctaaacggcgggcaaccgttcaaggtgcattatacccgtatgcactacatcgacggcgagcgagtaaccaacaaggtgcgccagctaaataatggcgctggtggttcggtgctgaacaagtcgctcattgaagcaattcttgactacgactattcggaatatctggcaacgcagctactgaagcgcaagcagcagggcgtttggaaggcgaaaggcctggcgctaatctgcgacgacaaggaaggcgagtatgccgcccggttgcgcatggcgcaggttgacgctaattccggcgtcggaaacacgatcggcattgatgctactgatgaagagtacaccgttatcaactccgatattaccggaatcccggaattcctttccgcgaaaatggatcggattgtcgccctgtcaggaattcatgagatcgtgctaaaaaacaagaacactggcggcgtaagcgcaagccagaacacggcgctacagacgttctataaactggttgaccgcaagcgcaatgacgattacaagccgctgttagaattcctgttacagttcatcgtaaccgaggaggaatacagcgtcgagttcgaaccgttgtcgcttcctaccgatgcggagaaagcggatattttccagaagaacgccgatgcagcacgcggccttgttactgaccaggttattgacgccaacgaagcgcgtgataccctatccgcactgattccggaactgaagttgaagggtaatgcgccggaacagaaaaaactaccggatcgcgcctccggttcaggcagcacgcaaaacacgcagatcctgaacaacaccgaggagggcggcgatgaaagttaacggcagaattccaaactggcgttatcctgaagcaagcgagcgggatttatcccgcttgatgcaggacgcgacaaccgatctggtcgtggaaatgcgggatcggttagaccgcctgaagttcgacgccacggcggaggaaatcaacgaggcggaagacgatatcaacgaggcggcgatcgcgttctttgctgccgtcattgcggctcttgcctccattgggttgacaatctatagattcaattctaagcagtggcttgcaattgcgatcgcggctggcgggcggaacaacgaatcagttatgcgccttaaagaattcggcgctggcgggtatgaagactggtatcaggaagcgctgaaaaagtggcaggattccgccgaagcgtcgatcaggaagttagcaagcgatatcgttgctgactggacgacgaaagttagaaccgccaacaacattggcaagtctcgccagcagatcgatgaaatcatcgaaggccgatacgccatttatggtagttggtcgcgcaaccgggcaagcggaatcatcggaacttttaacagtatgttgatgatgcagcgcctaaaagatgctaaagtatcgcattacttttggttcgggatgatggacgaccgcgagcgcgagagccatatcaagctagaaggtaagcgacgccccgttaatggcgacggcattttccccggtgaagagtacggttgccgttgctgggcggttccagattttaacaatgtagaggtatcatgatgaaaagagttcaaaggttcgacacggtaaagatgaaggcccgattcgatgagaacggctttctggttgatactccgatcgtggcgcgtatcggtgcgcagacgtaccagacgccaaccgggccgcgagtcgagttccgcccgcgttctgaggtgtttgatgctgaatcgctggcttcataccagggtaagccaatcactttgggtcataagatggtgaacgcgcagaacgcaaaaggcctggtcgttggctcgtgttccggcgctggcaaagaagaagggatcggcgttcttgttccggtgatgatttacgacggcgagtcaatcgagcaagccaaaaagcgcgtagcggctgagttatccgtgggctacacttcggtcgatatcgatcgcaaaggttggggcaacaacgcaactggcgaatattatttcgacgaagacctaccggaaaacttcgaagagatgaaaaatgattccgtctctgattgggttcgctttgatgcggtgcaaacgaagattcgcgtgaatcacgtcgcgcttgttttccgtggtcgtgccgggattgcgaaattaaatcttgatagcgaacaagaattcccctatgatgacgactcaaaccacaaaggagctaaaacaatgatcattaaaattgacggcgtagatgttgaagtggccgataacgtaggcgcttacattgccaaactagacgcgcaagttgcatcggcaaccagtcaggtaactagcatcaccgcagagcgtgacgcgcttcaggccaaagttgatggcattgaagatgaagtttccgcccgcgttgctaaaatcaaagcagacgaagacgcaaaacagaaagttatcgcggtggtttctgccgctggcgtcaagtgcgacggcctggatgttaaggcgatgaaggttgcttacatcaaagaggtagacggtcgtgatctgtctgacaaagaagattcgtacatcgacgcttcttttgactttatcgccaactctgataagatggctggcaatcgctccaaagtcttcggcaaaaaagaagatggcgagcaaaaagataaaggcggattaccgaaacttgacggcaccgaaatcatcgatccgcaggcaaaattccgccgctaataatttgcggccttcgggccgctaccaaaccaaataaacaggagattcaaaatggcacagattccagcttcttattcccgcaagcgcgatattgccgtggcggggcagatcgctgatacgtcactttacaatatcgacggcacctgtgttgctgaaggcgatatcaaagctggcgtactggtggcttccactggcgcagtttccagtggccacaaggtcgttaaaccagcaaccgcagcgagcgacgtcattgtaggcatcgcgcagttctcgcaagcctactcgcccgaaggcaagtatgacgatgagagcgcggttaacgttatgactcatggccgcatttgggcgatcgcggacgcaaccgttactgaagaagattgcgcgttcggctctttcgtcacctttaccgctaatggcaccgttgcgaagggtgatgccggggttatcaaaactggctacaaacacactggcgaatataccaagaacgcagatggcacagttctggtgaaagttcagctaacgcaggacgcaaccgccgctggcgctggccctgctggccccgctggcaagtctgcttatcagatctggattgacgctggaaacactggcaccgaagctcaattccttgcaagcctgaaaggcccgaaaggtgataaaggcgacactggcccgcaaggcccgaaaggtgataaaggcgacactggcccgcaaggcccgaaaggcgataaaggcgacactggcaccgcagcgtaaaaattaggggcttcggccccatttttgcaccagaaaaaaacctttgacggcttaacgattcgtgatattcttcatctcgttaagacaaatacacaaacaggagtttttcagatgactatgaaattagacgcattcgaacagagtgcaattaaggtcgcaatgcagggcatgggcgttgatgccgcaaaactggatgcttacggcatctggactgttaagcagatgactcaattactgaatcgtcagtatgagcaggcatacccgcagaccagcgcacttgagcttttcccggtaactaccgagatctcgccgaccgcccgccgctttgagtggctcgaattcgatggtgtaacttctgcgaaaattatcgccgattacaccgacgacctgccgaccgttgaagcgatggcgaaagagaagtcagggaaagttttccgcctgggtaacgcgtggtttatttccatcgacgaaattaaaactggcgcggcgcttgattccagcctgagcgatcgcaaagcaactctggcccgcgaaggtcatgagacgctcgttaatgatctggtgttcaaaggctccgctcctcacggcatcgttagcgttttcgaccatccgaacattaaccgcatgaccgccagcgcggcttggggtgatgacgcagcagcggctgaaaaggcattcgaagatctggaaggcctgctaaacatgatcgaagaaactacgctgggccgccatcacgcgaccaacatcgtgattcctccgtctaagcgtcgtcttctgacgaaaaagatgccggacactagcggcgactcttatctgacatggttcaccaagaaccacccgaacatcaccattacggcgatggcggagctggaagatattgacggcgcaggcgccaaaggcgtgctggcatacgaaaaagacccaatgaacatgagcatcgagatccctgagcggttcaacatgctgccgatgcagccgaaagacctgcatttcaaagttccgtgcacctccaaatgcactggtctcatcgtgtaccgcccgctgacaattgcgatccttaccgggatttaatcaaaaagcgccttcgggcgcttttttattgcattgcatcatacgatgtgctttaatttgaaacctaaagtaaaccaatggagcattaacaatggccagtaaaaaagaaaccgtagaaaccgtagaaaccgtcgaaaccgtagaaaccaccagcgccgaacaggcgtcgcaggttgttcaactacaaaacgttggtgcatgtgcaattcgctataaaggcgaaaattacgtctatgagcaggtttttgaagtgccggaaaacgaaatcgaccgcttccgccacgaaatcttcaaaggccgggtcgaattctacgacaacccgaaacgcacgcgcgaatacatcgcagcagtgaaggcgaaagcgaaagagatcgtgcagcctaaaagcgcggaataacaaaaaccaacaaagggcgcttcggcgtcctttttcatatcaggagatcgaccatgagttacacaattcaagatgtgatcgataaaatgcgcagccttgcacctccacttaaagaggttccagatgaactgctgtctgcgtgggttgtgcttgctgaagagttcgtttgcaaatccaggttcggggattccatcgttacggcgatcgcattgatgaccatgcacctaatgtttttggatggcgcgatgaagcaagaaggcgaaagcctggaatcttacacgcagcgagtggcatcgttcaccctgaccggggagttttcccaaaccttcgatcgcgtatcggcgtcaagcgacaacgaaatgctttctacgccgtggggcaaaatgtactggcgtatgctcaagatgcgcggcggcggcttcggcctgcttaccgctgggaacgtccgccgctgcggaattggtaggtgatcgccatgaactacaaagcaatccaggcccgcgcaagtgcgggtattaaattcttcagcgacgctgacggcgtgttcaataagtacacgaaaggcgctggcggcggaatcgatccggaaaccggggaagatatcattcctggcgaggtggtaacgacaatcaagggcgcgatcagggatgtaaatgaccgtgacattaacggcgaaaccatcctcgctggcgataagcgcggttttttcactcatgatgtgccaatcatggagggtgacgaaatcgaagtagacggcgagcgttaccgcgttgttaatgcgcgtccggtaaaaccaacgggaaccgttgttgcctaccgtccagttttacgcagggtggcgacttatggctaattatacgatccgggagttcacaggggctattgatgcatggtgtaaggccgctggtgatgcgctggaggacgttgtaaggtttacgtgtgaagatattcaccgcgaccttgtgatgcgttctccggttgatacagggcgcttccgtggtaactggcaaatcacctttaaccgcgccccgctttacgcgattaacgcatacgaccaaactggcgaaaagacaatacagaacggcaaagccaacattgcactatacgcaaaaggggctgggatcacttcgatctggttcagtaacatgctaatctatgcgaacgcgctggagtacggccattcaaagcaggctccaaatggcgttatgggcgttgttgcgatccggttgggcgtttatgttactgaggcaatcaagcgagcgagggcgaaaaatgcattatgatatggcgttaaaatgcaaggcggcagtggctaaatttgccgccgagaacgggttgagggtcgcgggggataacgttgactttatccctccgagaggcggggaaacttaccttaaagtctcctacgtcgaggcggattcaagatcggttgacctgtcaaggaaatgccgagtctatctggcgatggttcagattgacgttatctttaagcctgggatcggaacagaccgcgcgaggattatcgcccaacgcgttgcaaaatccttccctgaaggcaagattgttgatcgtgacagtaagttatatgtgagcgagtgggcggaggtacacggcgtgcagaagcatgaggctggttggttctttccggttcggttcacagtaagacgcgagagcattgaggaaaacggttatccatcagcctgacggatcttagaggtgcttataatttcttgccagcctggaaatatataggcataatggcgttgttaaactttcatcaaaacaggagtattcaacatgcatttaccaaacggtgcaaaggtcttctttgagaagactcgcggtgcgacggttccgtttaccgcaatgaccaacgacgcgaaaaacccaagaatcacagtggcgaacggcaagctgagggtgaaagatattgtgatcttcaccgattgcacctggggcgacttcgttaacaaggtggctcgcgtaaaagcagtgacagcaggcgaggcaacgctggaagagttcgacacctccgacactaacaagtatccgggcggcgcggccactggtagcgtgagcgtgatctctggttgggtcgaattgccttgcattcaggatttaggcaaagacggcaacgaacagcagttctataactatcagtgccttggcgatgagcgcgagcaatccgaacctacttacaagtcggcggtgacgcttaactacacgtttgcgcacgattacagtaacgcgatctaccctgtgctgcgttcagccgacgccagcaagcaggcgaaagcgatgtacatgtatatcccgcgagcttccgaggttcgttactggtctggagttgcatctttcgatgacattccttccacggctattaacgagatggaaacggtaacgcttaacattgcgcttaaaggtgcgcacgtcttccttccggttgtcgcgtaatcaaatggcggggcttgtgcctcgcctttttttgtgcataatagcgaataacacaaaccaatcaggagttaacaaaatggctaaattcaaaattcaaatcggcggcaatctcccttctttcaaactgcctgtaaccttcacttgcccggacggcaaagaagctaccatcaccatgaccgtaaaacatcgctccaccgatgagatgaaagacttctatgatagcgaagataaagcgccaaagggtaacgccgagtttatccgcttcatggctgaaggttgggatctggatgacgaattcagcgatgaaaacatttcctggctttgcgctcacttcccggcgttcgtcatggcactgccacaaacttacatggccgcgcttgcgggccaccgtgcaaaagtttaaggcgggctgtttatctcacgcttcagcctgagctaaccgatcgccagcttgcggagtatgggttaaggcgatcggactatgaagcagatcttgaaacgatctattttgatgaacagaccgcccaaagctggcagctattccaggccatgcaaacgcaatggcgaatcgggatgaatggcccgacggggcttgactataatacgttgccactgctgttcgaattgtataaaatcgacaatcgagaagcggcattacttgacttgcagatcctggagggtgaatacctgaaggagatttacaagaaatccaaataagcgcctacgggcgcttttttcatatgggggctaaacatggctgataaagtagctgggttgacgtttggcgttgacgtttcgcaggttgacaaagcggtacgatcactcgcagaactgaaaaaccaaagccagcaaacgggtgctggcctacagtcacttgcggacgctgaaaggcgggccacggcgcagaccgaggaaatgaaccgcgcgttgcagcgccagaagcaagagacagataaatcaaaaaccagctttagcaggatcgcaagcgccatcgatcccacgatctcaaaaatggccaacttgcgcaaagctacagaagaacttgataaggcgtgggctttggggcttgttccagataaggaatttttccgcctgggcgctatcatcgaatctactaccaaccaactacggcggcagcaggcggcgctaaccgaagaaggtcgcgcagcaatcgcagaggcggaggcaaagcagaaggcggcaaacgccgggcgtgattttgtcgccagcctgaaacagcaggttgactcaatcggcaaaacacgcgccgaactgctggaaatgaaggcggctcaattgggtgtatctgcggaggcggccccgttcattaacgcgctgaaacagcaagagcaggcgttaaagaaacagcaaaacgctatgggcctggctggcatttctgccgggcaatataaaatggccatgcgccagttaccgatgcagattacggatattgtaacttcccttgcgtccgggatgccaatctggttggttgctgtgcagcagggcgggcaaatcaaggacagcttcggcggcctgagcaacacgtttaaggtattgttgagctacatcaacccgctaacggttggcgctgcgtcgctgggtatcgccctggcggcaatcgctaaagctggttatgactcctggagtgcgcaacgagaactggcgaatgcgctggtgctgactggtggctatgctgcgaccacaaccgggcagatcacggccttaaccgaagagattaacaaaaactcatctgccacgattggcagtattcaggaaatcgcaacatcgctcgccagttctggtaagtacaccatcaaccagattaagcagatcacgaagactacggcggaatggtcggcgcagacgggggagagcgagaagacgatcacagggtattttgatgccatcgtaaaagaccctgttaaggggcttgccgatctcaatgagcgttttaattttctgaaagagggccagctaacctacatcgaatctttgcgtaaaaccaaaggcgagacggcagcagcagatgcggcgacaaaactgtttgctgatactatggataagcgccttaaagatatcgcggacagtgcaactccactcgaaacgatgtggatggatattaaaaaatgggcggctgactcgtggaagtgggtaggcgatcacacggtaggggcgctaaaccttatcgttgacacggtttccgcaatcatcaacacgatcaggaagctgattgccgacggcgacgccatgatcgcgcagttcatcgttgacgctggccgacagctacagaaaattcccggcatgggagacttcgggaatgactttctggcgcagcaggagcagttaatcaaggactcgaaagccaaatccgccgagcttgcaaaaaccattgcggaacagcaggcaaggatcgcaaaaggcgagatgggttacattgacgccgcgaaggataaaaccctttccggtgggtacagcagcaaaacgaaggatcgcgtaaatcaggaagaaaaagatatcctgaaaaaccgcaacgccaggaagcagcaggtagacgcgggcgttaaaattgatgagcagtatcaggctgaactgctatcgctacaggcgcagttaaaggttttgcagcaacacaaagggcttgatgacaagatcagccagcagcgcaaagactacttcgagacggttgctaaattccaggttttggaagaggcaagccagaagcgaaaactgacccaaagcgaacagcagatgctggcgaacaaaaagaatatcctgtacatggcggagcaaaaggccatcgtgggagatcagattgttcagcagcagagattgaacgccttgcttgacaagtcgaccaagtatcaaaaccagatggcggagaaaaccaaagcgctacaggataccgccggaatgggtagcaaggagcaggagagataccgggccaatgcgcaaatggcggctgactggaaaaacagcggcggatctttaagtgaccctggatttaaagccatgcaggatgcaagcaataaattctacgcacagcaagatgcgcaaatgctgaactggaaggccgggttcactcatgcgtgggctgacattggcgacgaagttaacaacgtatacagcaacatcggggatatcacaaaaaacgcatttaacggcatggcgagcgtgcttactgattttgttatgactggtaaggccagctttagcgacttcgcaagaagcgttatcggtgacattaccaacatgcttatcaagatggcgctgtttaactcgctttctgccgcgtttggtggtggcggtacgttcagcttcgccaacatgttcagcaagggattttctggcggcggttacactggcgacggcgggaagtatgagccaaaaggcgttgttcacggcggggaattcgtgttcacgaaggaggcgacgaaaaggttaggcccggaaaacctataccgactaatgcgcggctatgcaagtggcggcctggttggtggtaacgcaagttccggatctggaatcaccaacggcggcaacgtcgcggcgtcggcggctatggtgtttaccattggtgatattaacatcacgatgggttccggtcaggatagcaaggggttagagcagggcgtaaggcagatcgtgaacgatatgttcaccgaggctttgagccaaaacgggcgcattgcgaagttcgtcaatgagaaaacgaggaggtagtagtggattcctttaaatggtgtacacaaattcaaggaggggcggcgaaggtcgccgtctccaacaacgttcgttcgatcagctttggaaatggctacatccaaacggcgtcgagtggcattaacacaaagcgccggacggtttcgatcgtttatggtgggtcggactggcaagaggtttatgacttctgccaggagcacgtaaccaagccgtttgtatggaaggcaccggatggaagaatgggcgtattcgtcgtaactgccgactccgttaaccttgcgccgcagggtggcggggtgtttgaggtaacggctgaattcgccgaacgcttcacttcatccggataatcaaaagcgccctttacgggtgcttttttttggcctatgatctggagtcaattagaggagggcttacgatgacagccaatgtttcaaaagagtttgcgaactgcttacaaaaacttttccccggcgagatcctaacgctgatcgatatcgacgccacaaagttcggcgggcaggtctaccgattccataacgagaacgtcgcatatacaaccgaggagcttttagcggcggtgaacggcgggacgcttcagccaaagatgatcacgtttcgcggcgagcagtacggcccgcgcccgttcggcctgggcgggatcgcaatgtcgagcgatggcacagtggaaaagccaacgctgacggttagcaatattgatgcgcaagcgagtgctcttattcgcgcctacaacggcctcatgcaagccaaagttacggtatgggttttggtcaaggaattgctacaaagcgacggcagcgttaaagagggcgattttaggcgatttgtttactacatcgagcgacccaagaaggttgacccgcaaaaggcaacgttcgaattaacatccgtgtttgatatggacggattaatgatcccggcacgcctaacgcaaaccgtttgctattgggcgcagcgtgggtggtacaaaaccgggaagggatgcggctacaacgggcaaaacggatactttgacaaattaggaaatagggtagatgatcccagccaggatgtttgcggtggccttgtttcgtcgtgccgattgcggttcggcaatgaggctttagattttggcggttgcgctactgcaaccttgaaaagcggacggtaatatgttaactccaaaaatcaaaatgcagatcatgcagcatgctaaggaagtttacccgcatgagtgcgcagggctggtgacgcagaaatcacgcgtgcagaaatatcaccgactcgataacgtttcgccagatcctgagaacgaatcaatgccggacgaaacacagtacgcgctggcgtcactggaaggcgagccgatcgccttcgttcactcccacactggcgacggggcaaccaccgttccgagtgccacagatttatgcttctgtgatgaatctggcttgtcgtgggttattgtgtcgattccagaaggcgatatgcggattatcgaaccgaagcgcaggccgctgattggtcgcccttgggctttgggcgcttacgattgctatggcctaatcatggattttcacaagcgccacggcgtcacactaaaagatcggcgagtaccgttcgaatggtggaagccggaatacaaagagaatctttaccaggattactggcaagaggacggattcattgaaaacactggcgatcctgaagttggcgatatgatcatcttccagcttcaggcggagaaatggaatcacgcggggatttacgttggaaataacaacatccttcatcacgcatatggcaagctgtctcgccgggatatctattctggatggtacgagcagcataaggttttaatttgcaggcacaaggagcttaaacatggcctcacatacaaagacgattaaactttctggttccctggggcgtcggttcggcgtattccacaaacttgcggttgattcggttgctgaatgcatccgggcgctgtcttaccaggttgaagggtttaagccgttcatgcagagcaaagttggttcaaacatgcgcttcggtatcatcgcagacggaaaaccaatcagcacgaacgactttgcgacttttgccgtggcaaaggagattagaatcatcccgatcccaaaagccagaaagaacggcgggttgttgcagatcgttatcggcgcggcgattatggtggcggcgttctacactggcggcgcagcattggccgagatgggcgcttttgcatcggcggcctttatggctggtggctcaatggttttgggtggagtaatgcagatgattgccccgcagatgggcggcaacatgcgggcgagcgaatcgcctgagaataaaccatcttatgcgttcggcgggcctattaacaccacggcggcaggttatccaatccaattaccatacggttacagattggctggcggcgcattgttcggttcgggatcttacgcagaagacaacaactaattaagccattcgctttttagcctgggggcgtagcctccgggctttttgtcgtgtacaattgcgagactattaacaggaggctaaacgatgaataatatcaaggcccgtaagggtggctccagcaagccgcgaaccccggtagaaatgccagataacctgatctcaaaagataagatcaagttgttgcttgctgtttcagatggcgaggtggttaacgacttcagcctgaagcagttgcattttggcggcgtcccggttcagaacgaggatggaacattcaactatgagggcgttattgcagagttccgccccggcacgcaaacgcaggactacatccagggcttcagcgagtcaagcgctgaattccaggttgctcgtgaagtcactcacaacacgccttatacgcttaccgtatcgaacaagaatctttctgccattcgctttcgcctgttatggccccgcgttctgaagcaaaaagataacggcgatatggtcggatcagttgttgagtacaagatcgagatggcggtagatggcgcaagttatcagacctatctaacgggcaaaattgacggaaagaacacgactggcggttacgatcggagcattcgcgttaacctgccgcaaaacttcacgtcgcaggttcttatccgcgtgagccgagtaacgccggacgctgacggggtgaaagttgtcgacgctttccgggttgaatcctacgctgaagttattgatgcaaaattccgctacccgttaacggccatgctttacgttgagttcgatagcgatctgttccagaaccagatccccactatctcactcaaaaagaaatggaagattatccaggttccgagcaactacgatccgattaatcgcacgtactccggaacgtgggacggtgttttcaagtgggcgtggagcaataacccggcctgggtgctttatgacctgatcatgaatcagcgctatggcttagaccagcgcgaacttggcatcccggttgacaagtggtcgctgtacgaggtggcgcaatactgtgatgagcttgtgccggacaatcgcggcgggatggaaccgcgctatttgatggatgtagttgttcagtcgcaggttgaggcgttccagttggtaagggatatttgttccgcgttccgtggaatgacgttctacaacggtgaaagcctttcgattatcgtcgacaagccgcgcgatccggtgtacctgtttacggctgataacgtcgttgatggcgtgttcgttcggacgttcccaagcgaaaagacgatgtatacgtcgtgcaacgtcatgttcgacgacgaagaaaaccagtacgaacaggatgttgaaccagtattcaacccggacgcagccatgcggttcggccacaacccaacgagcattacagcgatcgggtgtaccagaaggacggaggcgaaccgccgtgggcgttggattctgcaaacgaacctaagcgctacaaccgtttcgttttcgactggcctggaaggcatgattccttcttgcggcgatgtaatttacgttgcagatccgcactggcaatcggcctttaacctggtgctttcagggcgaatcatggaagtaacgggaacgcaggttttcctggctttccgctgcgacgcgaaggcgggcgatacgctgattctgaacactgacgacggaaagccagtgcgccgcacaatcgccagcgtttcggctgacggtaaaaccctaacgctaaacgtgggatttaattttgacgttgcgccggacagtgtattcctgattgagagcgatcagcttgcagcggaacagtatgtagtaacccggattgaaaagggtagtgatgacgacgaattcaccttcgccatcacagctacgcagtacaacccgaacaagtatgacgcgatcgacaacggagtaattaccgacgaccgaccaacttcggttgtcgacccggattcaatgggcgctccgaaagacttaacgattagctctttctcccgcattgttcaggggatgagcgtcgaaacgatggtgatcggctggtctgccgtgcagtatgcaaaactgtacgaggtgcaatggcgcaaagatggcggtaactggaacaacgttcctcgcactgcgacaacgcaggttgatattgaaggcatctatgctggcgagtatcaggcccgcgttaggtgcattagcggcggaaatgtagcgtctccgtggtctgcattggcaaccgccacactgaccgggaaagtcggagcgccaaaaggcccgattaacctttttgcgtcggacaatgagatcttcggcattcgcgttaagtgggccatgccagaaggggcggaagacacggcatacattgagctttaccagtcgcaaagcggaaccgatcaggacgcaagcctgcttacactgattccttacccggcggctgaatactggcattcaattctgcccgctggctacgtgaacttctacaaagccagaagcgtagacaggatcggcaacgtttcagaatggactgattacgctcgcggcatgtcgtcgactgacgttaacatcatcacagatgcgatcctggatgaaatcctggatagcgacgcgatgaaggagctacaggaaaacgcacaggatagcgcggcaaaactcaatgactacgcgaacagcatcattcaaaacgctttggctaatgatgcggacgtcagggttatgcgcaaggagaacggcaagcgtaaggccgagatcgcacatactacggtgttgatcgccaacgaatcagaagcgagggcggctgaaattacgcagcttaaagcgcagattgatgacgatatcacggcgcagatcacgacccttaacgaagccctggcgacggaaagcgagacgagagcaacgcagatcggtcagttgcaggcagattttgcggctgatattgacggcgtaaaaacaaccatgaacgctggttttacgcaggttaatcaggctattgcaaatgaaagcgacgcgcgggcaagttccgaggcggcgctagatgccaaaatcgggcagaactccgcagcgctaaaccagaaactcgactcgtgggcaaatgttaatggcgtcggttccatgtacacgatgaagttaggcttgaggtacaacggacaggaatacaattccgggatggccctacagcttacctcaaggggtggaagcgttgtttcacaggtgctgttcattgctgatagatttgctatcatccgtaatgcagcgtcgggatcttacacgttgccgttcgttgtacagaatgaccaggtgttcatgaataacgcgcttattcaggacggttcgattaccaacgcgaagatcggtaacgtcattcagtccaacaactttcaggagaatgttgcaggatggaggcttgataaaaacggcgtatttgtcaactatggttcaacatctggcgaaggttccatcaagcaaactaaccagaacatcacggttcgagatggtagcggccgcgttcgttgccagttgggtaggatcactggcgcatggtaaaattaacgccgggagaaatcccggcttaaccaatggaggtattttatggcttatggctttcaatcttgggatgcgaacgggaaccccaacaactatgggatcgtccctgtttcggttgctggatatattgctttggcgcaaggccagaaaagcggaacatggtattacaacgttccacctggtttaaggttgggtttcttttgggtcgcaaatcaagaccagtatggcacatcgaagaggcgaattaccgttagcggaaatcagatcgttgtttctgatgcgccagataatgcgctggaatcgggcgtctacccggcgacgcagggctttattgttgttcaaattatgagttaaagattatggcagattacggaattttacttaccaatgatagaggcaatgtttgggtttcgcctcaaagcatcccgctggcactgctatcaaagcaagacatcactcttaggggggggactaactccgatgaggtgagatcggtaacttacgacacgaatcatccatgcgttccgttcgtggtctttcatggctcttcaccacaaggtgcattcacaaaaatcaagtacagcggaaacacttgcagcgttgttttttcttttggtaagcaaaacgtatatgcggaggtttattttttctctgtgttcccacagccaaatcctggttatgggcttgcaatttgggatgaaaacggcacgctgattttgaccaatgaaaccagaacactttcagacgtacagacctacggcactggttttaatctaaacgtcactaacggcgggaagtgggcggttagtcctgttcagttgggggcgatcgttggtgttattcgtgatccatacccaagaccatttcagggcgactatggcgcagcggcattctttaacggctcaagcacgcaacttaccgcatatctaacgcaggcaccaggaggggccgccagcgatctaacctacgtcgatatgaaaaacacctgcatcgctattgattgcgcaaggtatgattaaaaagaaaggggccatgcggccccttttttacatccctaatttatcctcaagtgcggataaccgcgcttcaaatccttttgcgataaacatgtttaactcatcaatgcggaacgagtagcgatcaccagccgggatggttttgtagatcgggttttccgacccgtcttcattcgctggcccatattctgaaaccaccgtttgctcatcccacttgtcataacagatgaagccatatttaaacggctcaagaccaaaactttccatgatctccatagcacgctgtacggtcaaaccgcagtgctcgcgcacgtcgttcatgtcggcttgctctttccacgtccagaacccgatctccttcgcaatggcttttgccgcttcggtttcaggatcgctcatggctcgaacgtcgttcttcatccgaccgtctgaggtgttgattgccccatttttagcgtagatgttattgactcgaccgctaccccttccaatatcataaccgccatcgcccatcgggacgaagttcccgttgtggtcaacgcaccagcgagcggttcgcgcagttgagcctgccgcgcatgtttcgaacaaaattcgcgttggcgtgctggtttccccccacccctccgtagcctgaatgttaaccgcgccgcgcattgagtcgaattttttcccgtcgtggccagatgcaccaaagaagaaattagaccatgcctgtacagcgccgatatatttatccgagttacccaggctgccatcgcaccacattgcacgaaccgcaggcgatgaattattagatccgcgaggcgcaatcatgttaatttccggcgcaccatctgctgatacaatcttcaaccctctgccatcctgattggttggagcattgaattttggaacggctgcatttaacgtttcaaagctacgcaccaacccaagatctgagtgcatggccctatccggaacaatccagagatctccgttatctgacagcctgaacgccggaaccctatcgctaatcgtcttacctttgggggtgacaagcaatctaatccagccaccatgattggttccagatgcatcgccagccccaaggaaatgcaaggccgcgttactgtgctccgtatagtcagatcctaaccacgggcgagaaccataaccacctaaaagctggttgttcttcgtcacgctgttagatgcgccgcgcgtatagttatggaacacagcagatccgccagcagtattttcaatcccgaaagaacactccgttgtgtggttgccgataaagttaacgccaaccccggttgttgcggttgtctccttcagtggcagcttctgcgatgcggtaacatcaacgccattgctttttacagtgccattaacaagcacatcaccatttcccgaaatggtcatctggccattcgtagaggtgtcgccatttgggcggaacatcatcccttcgctaccagaaggagttgaaagcacaagcacatcactgttatttgccctaactacacaaccgttcagggtcagcgtggcgtttccgccgggagcgctaattgcctgcggctggctaaacgtgttggccacgttggttcgcgggatcgtgctatcgttagccagcaaataatctgccgggttgttatatacaatcccggttggctccgtggtaatccacgaataaccagtgcgatcgatgattggcccggtaatcgacccattgttagcctgtacgtttaaacgattcaaccacaggataggaatccagccacccggagcatgaagataaatatcatatgaagcatccgccttttttaccgccccaagattaacgcgcttggcgtttggcctggcagaaatcaaggttcgttgagtgaaccaggtgtcaatatttccgcttgtcaacggcgaggctggaagacctcttccagacaaggagaagatatcaaccgggacgtttgccgcaccataaccagaacctccgccaatgatgaattgaacgaaagcataagcggttccagcgctcttgatgttagcgatcttcatccatgattcggtgccggaagcaaccctgcttaacttatcaggtgcttgcacgccagccacaagatctacaacccgatcacgaagattttgcgtctgccccttcgctgtttgcgcgtcggtcttcgcggagttggccgcattctctgacgcctttgcattagtctctgaagtctttgcagcggtttcagatgccgccgcagccgtagcgcttgcgccagcaaattcagaatcttgcttaacctgattggcaagattttgcagggaatcgaaatcaaagttcttgaagaactcgactgcatccgcaattacggtttcctgtgactgatagtagcgcagagtttcggcaacatcttgcgccaggccgtcaacggttagcgagtcgcttaacaggatcgcgtaatctgtagacgctacgacagcgccttttgtggtgatggctttaatttcagtatcgctaaccaccttgtttacgacggccatttgaatcggtgacgacaaaaacataatcgtcgcgccggggcgaatcagcgaaagcgaagattgccattttgtgccagtcccggtaacggttccgtctgcggccatagccgctttgccttctctgtatagtgccattttaaaagcctcttatgttggttgagtaacgcagataatagcatcaatgaacagataaaaaaaggagcctttcggctcctttagttgtcaaattagaacgggatatcatcatcgaaatccatccccgtattcccgccgctgttttgcggcttaggcgcttgttgcggcttgggttgttgaggctgcccccacccggattgctgattgccgccgttttgcgaaggctcgcgctggctgaattcgagttgtggcataatcatttcattgtggctgtaaattgtgccgttgtgctcgcggttcacgatctgaagcgtccggcaggtgacgctgatcaccttatccatttgcagcgcttcgtcgtaccacttaatcatgttttctttggcaaagaaaacggcgcggtagttcgtgtaaaccgtttcgtcctggccatcacgattgcggatcttcattcgctccgacaggtctacggcgtacattttccacgtcccgttattgttactgccttccttgacatacggttcctttcggataacacctgttacaacatgcattgtcgttcctatggggcggtttcccgcccggttaaattagttgaaagatgaaatatcttgcgcttctggttcaggctttgattctaccttttccggctcccgtttcgcaacctcttgcggtttaccagggttaaagccgttagccggggtgactttcagttctgcctggcgtttggtgatatcgtcttccgtcattttccattccgcaggcgttaacgtttgtttcgccagcttatagatctcacggagcgattcgagatcttcgcacgcgtcaatgcgttttttgaagtctttcggcgtcatcttcgtaatttctgcatcatcatccgcctgcttgatgcctagcgctgcggccagtgcatagcggcgggcgtaagatgttgttgaaccgtatgcttgttcgactgttttgctgatcggcatattgtactgaaacgccataaactcaccgctttcgtgcagaaacatcgtttcgaggtgcataaccttttcggtgctggtatccatcatggattgaatgaccataatcttattcttctccagcgccggggaaatagcgtcgaggatatcaccaagattcgcgtaggtgttcccaagatggttgttcttcccgcttttcttcgcggccacgaagccagattttgctttgattaatgcggctgcaatggtggtgaatttttcagatgtacgcatgataaagtttccttttcctgattggtaatgcgcactatatcacaagtgcgcaccagtgtttagctatttgtgccgtatacgtccgggaacatgtatttcacaaactgcggagtaggcaaaactacttccgccgcgtttgactcatatgatggccatgaatcatgcttcacgcattccgcatactgatgaatcacgctttgatactgcttgcgcccgatctcgatctgctggctggtcagggtgaacgccagcggagcaaacggtgactttttctcctgcgttagcagtctgacaactaccgggcgtttttcgttgtaggtcttcacgaatagatcgcgctgcaatgccatcttgagatagtaacccaggttgaaagcgagtcgcccgaaatcgtccggcttggaggattgagtggttttgtagtcggtaatcaccacgacctcgaaaacttcatccgggttgaacccccactccttgatgagttcgggatcggaaaccacgtcaacatgatctagtcgaaccttgaccttgacgccgaagatctcaccgaagattgacaattcacgctgtgcggtaggcgattcgatacatgcggcgtgtcgcgggttggccaacatcacgcttcgcatttgaacaacggcatcgaaatcaacatccttaaccagcttgcgcccggagttcatcgcggcgctttcgtcgcaaagttcaatcgcccaccaaacatttacgtcaatcccggcgcgatatgccatttccagaagttccgggtaatccttgttggacgtcccaatcaggccacgcgctttcagcttcgcagacagtgccgacttcgacgtaatcagatctttaacctcgcccggagaagtcgcccgcaggtactcgccattaaattttgccgtttcaagcatacaggtatgcgaacaggttccgaacgccagcgcggcggtttcctcacgcaccttgtatttccagtgcgccggggatgttgcgtaaatctcgccgaggcttgagccgctaacgtattccgcgcaccaggagttaggatcgtgatattgctcgttagtcaattcactgctggtgtatgccctgaaaattgcttcagccattgatattgctccatttgtggtttcgttgcgttaagtatacgcatgacgattcccggcgcaagtcaaaaagtgctatccgcagttggttaaaaaactagcgaaatttacgtaagatttagtaagatgcatcttacgtgatttttcctatatatttcattgagttaatgcaaatcggtaagatggtaagatccctataggtaaatatccatgaaaaatatggcgcgaaatccagcgaaaaaagacacgtaccccggagaaatcttaccaagattgatagatacagatagagcaataataatattgttatttatcatatacttactatctatatattgcggttaattggttaaattttgcgcgaaatttacgtaagattcatcttactaaatcttacctaaagtggttcgaccagttgcaagctactgaatttcaggcataaaaaaaggtaagactgatttgctcaatcttacctaaattctggtcaacatttaatcagagaagcgacgatgccttgtacaacttacgttcaaatccgagcttaaagttgtcaccattcggaacgataactttaagatcccgatcgtcagcagccgccagcatatcacgatctccacgacggcaaactacccgcatttctcgcttaccttctccgccatttcctttatacctgtacgccacgatctcgacatttgaagggatgatgcaggcccaaacgtcgcacttgaacgaactggcaatattgaagtgcatcgcctcaatccaggatcgagcaaggtaaatcggcccgttaccgtcgtcgctctgattggtcactatcacagatccgaaggtcagatcgccagctaacatcttctcgcgcccctcctcatcaatgaacagcatgttgcaatactcatcatccggcccatcctcatgcacgagttgcattggtagcgcgtgaattagctcctgtctgccgttctcgtgggtttttatgcctacctgatatgatttgatatgttcgttttcgatgccctcataaagcgttacaggcgtgctatcgactgcctccgttctgtttaaaactaccagcactctttcatggtcggccatcttgccgtagtcatacccgttatcacgagccacctgcttgtttctcttgaccacgtactcttgcggaacctttccgagatagcgcccaagaatgttgatgcattcgctatacggctggccgcttaacttcattaaccagccgatccccttatcagcgccgcagccgccacagtatgcgccgccgtcgcctcgtgtttctaacttatcagtccagcggaatcggtctttgccgccgcagttcggacagtcctggtgttttccgttgaagtagcgagagtgaatgccgcaaatgttctgcaacgcttcgcgccacatgccagccatgtacggcaaaacctctttttcatcgtaaaaatccacgtcgtaacctccaaataaaaaacgcctacacgagaatgataacccggcaggcgtttagtgtttagacaaattgtgctatctgactacgcggagcatttcgcggcggtcgcatcggcgcgtcactggcttgccgttgctgtcaaatcttaaatctggtcggcagaatgaggcgcggaaacctttgcaattgttccgtcggtagctcttatgcacgagataagcgccatcggctgagatcatgccgcgcttacgccactgctgaacaacctggatgctaacccccaactcttttgccgttccagcgataccaccgaaggcatcaataaccagctccatccgcgcagtcaacccggctcgaacctcatccttcagcacgtagtaaccagtcggtcgcttgcgtttcttcttgtctttcccgcgcgatgttccgttgttgccgttcaaggttcgcttatccacctttgccatttgttccataatttaaccctcatagcattttttgttaaacctgataaaatgttccatgtattatacacgcaactatgcgaatgacaaattaggattgcccatgctcacaattgaacaacaaattgaagcctacgcagataagatcccgttaatacaaaagcggttcaccgtcggaaatatcgttccttacccgtatcaggctgttgcgtatattgagaccgcgaagcggatcgcaaaatatgaacatccgttttacattaaggcttcggtttccgccgggaaaaccatcatgatcgccatgctcgcagcgcagtgcaaggcaatgaacttacccatgatggttcttgctcgccaggccgagatcgtgaagcaggattccgaggagatcagtaacctcgacgttccgaactccgtttattgcgccgggttaggcacgaaggcggcatacttcccgatcgtcgtcggatctgaagggacggtggttaatggtctgtttaaaatgctgggcgactacgtgccttcagttctggctatcgacgaatgccaccaggttgactggcaggatctggcggaagcgatcgccaacaatgaatcgttcgagtacatgagccgaccgaaggataagccgtatcgcgtgaacggggaactggtcgatgccgaccaccaatacgacgaaaaattcgacgacgtagaattcggcggcggtcgcacacagtacaccatcgtcatttgtgagttaatgcggaggtgccttgagaagacagggcgagaacttcgcatcgttggatatacgggttctgagtttcgcggcgtcattccgattttacaggaagacaagagccagcctggtttttggcgcgagcagatcaccgacattaacacaaactatcttgtcgagttcggatcggttgttcccaccattttcggcgataccgaggcggatgggttggggtatgatctttcagaatttcatggttccagtcaggacggcacgcaggattttagcgcggaagaattgcgcaagatggaaaagaaaatccatgaatccggcgaaatgacgaagctgattatgcaaaaggtcgtggagcgtgcgaaaacccgaaacggcgtcctgataacttgcgctggccagcgtcattgcaaggaagcggcaagctatctaccgccggacgcaacatacgcaatcatcacagagaagacgaactcaaagaaacgcggcgaaattttggataaggcgaatcgcggggagattaaatacatcttccaggtgatggccctaaccactggcgttaacgttccgttttgggatttttcggtgatattgcgcaagatcgggtcgcttacgttgcttattcagcttttggggcgtggaatgcgacttctaaaggactggcaaaaacagccgccttactcgtgggtgaaagaagatcaccttgtctgggattttgccggaacaatggatgacctgggccagttgtatttcgatcctattcttgagcaggcgcaataccaaaggcgcaagagcagcaagaacggcccgaaaatctgcccggtatgcaagggagaaaatagcgagtacgcccgccgatgcatccacaaagacagcaacggtaatcgttgcgaatacttctggatctcgcagcgctgcgaagaccagaaagacccacgaacagggaagattaaagtaaaagggtgttacgctgaaaacgatattgttgctcgccagtgcagatgctgcggggtgcagcttaaagacccaaatgacaatctcaccgggaagcactacacgcagaatgactggtatgatgttgtcgggttcgatatcggcttgactcgcaatcagtccgggatcatcttcaattacgtgttacttaaccatgacggcgagcgattcaccgcaagggaaaagttcttcccggaatcagagaatcagatttgcggcaagttgtggcgacaaaaggcagtcttccagcacgttagcgacgcggtaatgcgcggcaagctgggcggaatgaaaaatgcgcgaaaaatccttgagaatgcgcattacttccgagcgccgaagcgcgtaactcatcgcgttaacggtaagaaggaagatattatttcacgcaaagattttggagacgaatagtgattactgataaaggtgattatctcgaatactacggcgggcctgtaaaggcttgcccgcttgagaaaatcgatcagatgaatagcgtttcgtggctgcggcacgaataccctgattatctgttctggcatacggttaacgaagggagtaagcacaaggcgagcgcggttatcgatcatcaaatggggttgctgaagggcgttagcgacattctgatcctgattgggttctgcggcaaatacccgttcgcggccatcgagctaaagcgccagggcaaggcgcaggcgtcaccagtgagcaaggggcaaagggaattccttgctgccgttcgccgtcgcggcggattcgccgccgtggcctatggcttcgagcaattcaagatcgctttctgcgatgccatcaaatagcactttttgttaaaaccgcccggcgaaagccgggtattattaccacatcgaaacgaagaacggagaaacatcatgaaaaacttcttgtgggtaatcgcatcaatcggttttggtgttgtggccactggcttcggcctttgggtaattactcttgctggtcattttaagggcttctaaatgaaagatatagcagacaaagacactcgtgacgcattcatcacgtttgagcaattggagcgcgaaacgtttattggcaatgcccttgctactggcggacactatcaggctgtcaggcccgacaagttttaccaggtaacaggcaaccgatacgccgggagcaaaacgcctgatatcgtgcgcgataagtgggcgacagatcgcagcctgatcgcatacatggaagagcgttatggcccttacgatcttgacgcagcggcagaccaaagcaacgcagtttgtgcgaagttttacgacgaaaaaacggattgccttaaacgctggtggggaaaaaacaagcacgtttggctgaatccgccttactcgtttccagatccgtttattctcaaggccattgagcaaatggagcacgacaaccagatcgacattctgctacccggcgacaattctactgcctggttccgtgacgcgcagaagatggcagccgaaatcatctggattgttgccgatgttgaagaggatgatgacgggaaccagttaagccgatccggtcgcctcgccttcatcaacggattaagcgggaagccagtcgacaacaacaataaaggaagtgttattttcatcatgcgcaagctcaagccgggagaggagcaaaagacgctttacattccggtaagcgagatttgcccgtcattagctaaaaagcgtatgcgcaaacgtgggatctgaaaaatggaacagatagaatctttcaccgagtatcttcggatcgtggttgaattgctggacaaatacggcttcattgggacggatgaggaaaagttagcctttgctgacaccatcgacggaacctacatggagttcattgacaacggaaccccaatcgctgactggccagaaattcttgaacgagaattgattgagtttaaatcgcatgaaggcgcggagtatttcgcaaaacagcactaattgctaaacaatacccgccgcgtgcgggtattattactccatcaaccaatcaggagcaaacgccatgaagacaaaaaccattgcagacaccatcaagatcgtaccagcaaaagcgcaagtggtatctcgccacctggttaacctttctcgcctgtgcatggccgactacatggcgaacccttcagataatggccttgatggtgtggtcggtgagatttattttcgcgcagggtacggccttgaaagcgtggccatgtatgagcaaatggccgaaggtttttgcatttacggtgacgaatgatgattgtcgagactggtcgcgctgccgtatggcagcacgcaaaagaggcaggaataagtgatgatatcgtgaagatcgcaaagcatttcgatatcaaagatatatcaattatttttggtgggaagctcacctatctacacgagcgcccggtgaagcgcacgcgaatagcagtggcaacgcgagcggaggcagacgcgctgaagatgttcatccacgagtctaagcagcagaagaaatattacaagtagcggggaggtgaagaatgcgatatattgcgatcctgattacggcggtggttctcactatcgcaatctttaactacgcaattcaattgggataaattatgtcacctaaaatcacagacgaagaatttttagccgcccgcgaggaggggaaaacctaccgcgagatcgcggaagagttcggcatgaacattcgaagcgttgagcgtcgcggcgttcgcctggcgcgacaaggacacctacacggaaacgcccacgttgcgaagcatatcccggacggcttcggcgtcaaaggcacgtcgacgatgattcgcgcggacggctccgaggtcgttcggtgggttaagtcggaagtagaccgcgaccgcatggtcgcacttatggaggcggcgcaggcagctttctgcgaagatcttccgcgagccgaaccgcaaccgctggatgaatcgaagttctacattgaagatcagcttgccctgtacccgatcttcgacctgcatattggggcgatggcgcacaagcacgaatgcggcgagaactatgacaccagcacggctgagaaggttctaaaccgcttctttgattattccgtgtcggtggctccgcaatcacaaaaagctgttttgctggtaggtggtgacttccttcacagtgacggcctggacgcagtaaccccggcaagcggtcacgttctcgatcaggatagccgatacgcaaaacttgtttatgttgccattcgttcgctgcgtcgcgcagtgtcgctactgcttaacaatcacgcagaagttgaagtgcaggtgattgaaggcaaccacgaccaggccgggatgatctggctacgcgcagcgctggcggcgttctatgagaatgagcctcgcgtttttgttgatgttagtccggcgatcctgcatcgcaccttgtggggcaaaaccatgctgggctatacgcatggccacacgatgaaaaagccggaaacgcgccttgctgcgatggctaccgacttccgcaaggagttcggccagtgcgactacatttacacgcattccggccactggcatcaccagactgtaacggaacactcgttaggaattgacgaagtgcatggccagttaggcgcaaaagatgcctacgccgcacgcggcggatggcgttcataccgccaggctgcggtgattctgtacagcaaagaatatggcgaagtaggccgttttatctaccgtccgaacatgtaaccacaacggccccgcgaggggccaacaaggaaaaaccgatgaatagaaatatctgcattttcgatctcgatggcacgctttccgacggaacccaccgcttgcacctgctgccgaaaaaagatctccaccttacagaaagttggagcgaatttaatggcgcgtcaattggcgacagtccaatccaaagcactattgacgtggcgaatgcgctttatcgatccggaatgaccgttatcatcctgactggccgatccgatgaggtgaagaccgaaacaatgatttggcttgaccgctacggggtgaaatatgacagcctaatcatgcgccgcgccagcgataaccgtaaagacacggtaataaaggaggaggagttacgcaaaatcggacttgatcgcattgttgcggcatgggatgattcacccaatgttattgcgcacttgcgcggcctgggtattacgacttaccaggtctgcgactacggcgacaatcttcacgatcatttaaaatcacacggagtagacaaatgaaaaatgtaattatcctcaacggagcgcccggcatcggaaaggacactatcgcggaaatcatctcgcggaagtggcaatacaagaaccttagcttcaaacagccgatgtttgccattgctcgtgctgtgctgggatctgctgattttgcacgctttactgcccgataccacgaccgcaagcacaaagaagtgaaatgcgattttttgggcgaccgttctccgcgtgaattcatgattcacattagcgaaaatttcgtcaagccgaccctgggcaaaaatcagttcggcaagttgctttgcgattcagcgctaacctcgccgtttaactgcatcgtcagcgacggcggttttgatgaggaggtcgagcacgtcgcagcgcatgaggcgcttaacgtatttgtcgtccgccttcatcgtgacggcatgacctttgagggtgatagccgcaagcatattcgacgccaggatcttatttgcgacacttaccatgaactcgatttttatatgaccactggcgagccggaagacgacgcgcaaaaaatccttgatatggtgtcagatgttgcattaaaattataaagttaatgcctttattatcatcaccttaactattgggaaccttgatgggttcccttttttttgttcttaatttggcctaatgcatatatcatcaccttaccatttaactaacagaggttgcatatcatgcgggaattcatcaacgcggcaaccaatagcagcggtggcgttgccctcgcgggatctgcatccgggcaattaatcattgctgccattggcttatttttcatgattctattcggctccttcggcgcgtggttgcgctggcgagattcaaaggcgcttcgtgaagcgctggaagccggggatatcaaaacggcgatgaagatcaggagtaaataacatggggattaaaacgcgggttacattcgcggcggcggtggcgatcgcggtcgcgttcctccccaaagtggaggacacgaaatacaatgtttatatggatatcgctggcgtcccaactgtatgcgaaggcatcacaggcccggacgttatcaaggggaaaacatatacccggtcagagtgcgacgcgcttttaactaagcatatccaggtggcgaagcgaaccgttgacagcaaaatcaaagtcgatgttccggacaccttcagggcgtcgatgtacagctttacgttcaacgctggcggcggcgcatattctggcagcaccatgctgaagttaacgaaccagggccgattgcgcgaggcgtgcgagcagctatatcgctggacgtactaccgcaacccgaaaacgggaaagatggagaagtcgaaaggcttgcataatcgccgggttcaggaatatcaactatgcattaaggaactgaaatgagcacattaaactttcaacgagcgctggccatcggctttatcgtgtgggcggctgccgtcgtttccggttgcgcgtcaagcgtcccaatcctttccgatctggttggtagcaagccggatatgacggcgcaagtcggcgcggagaacgtgaaacaggcggttggcgtgaccaacaaaacggacacctcaagcaagcaggagaccacgttcaaagagtcggctgtaggcaaggttgacacgtcgaacaagaaatccgtaacgacctccagcattcacgccaaccagatcacggcggacaagatcgagatccggaatgatgaaagcggaagcctgattccgtggctgattggtggtgttggggtggtaatgctggcgatcggggtgttcggtctttggcgggaacgaaaaaacaaaggggcgtaatgcccctttttctatatgtaccgtttgacgtgcaatagcgctactccgtcttcatcgttaagaccatgttcaaccgtgttggttgcggccattccttgatagagcaagatgagcgcggcacgcaagtaattttctggtgtgatctgtttcacgcaaacaagcctgtgaacttccgttatcagatcttccacctggtttcccgaaaagctgttcatcactgagttggtcaaggtgcatcatctcccacatatatcggttatccatcccttcgaacgaccggaaatcaaagcctatctccctgttatccggccccgtacaccacacagcgccgttttttccgtcaaggtatccattcgtatagcttcgcgctaaaaactccttagagaccattgaggcgaacatacgttgcgacacgttggcggcttttgccaggcgaggcgcttcgcggtgcgtgtaaacgaacttcgcaaaatcctgccgggtgaactcccggcgagattcgcagaacttgtaaatgtcaagaatgaacatcaattacctcatgaacgacgggttgataaagacttcggaatccatcacgcagataaagcctaattcctccatcttcggcaataagcgttccttaatctttttgctcaccccggcctggcctttgaagatcttcaggttgcggcaggcgttataaatgccctggacggtcataacaccttttgcctgtttgcaacgactggcgataacgtcatacagcgctttaatttccgctccctcaccagcaaagccggaagagtcagccgacgacaaatacgttttgctcaattcatggaacatgatgatcgcttcgtcaatggtcgccgtgtcgatcttcttcgagcgcttcccgccgggttgccagttccggatcgtgtgaatcacggaagccaggcgcataacctgcttatcaaacttacccatcgcaccgcgaagcatagtatgcgaatactttccgccgtcgcctaactccggttctaattcctggcgggccttgttcagtctccgcatggctgcatccgtaacctgcaacttaacgtttgattcgctcataatgtcatgaatcagccggaagtaatctgccttcagtgactggtcgatcggctcataggtcgaattcccgttttcgtcgatgaacacgcgctcgcctaaacgggtttgctcacgaaccaaaaggaaacgctccgagacaccgatcccgcgagaacccgcttgcatgatggcgtcgatggtttcatcctgtgcaattacgcaaatgcagcccaaagccacgaatgacatgttattgctaacgtcggcacgagcgatcgatacgtggcctttatcccatgctttgagcaccagttcgctgttcgtcttcttgccgccatcgttgccatacgtgatccccaaaaggctgttaaccgccgtcgcctcatccgagataacggcaaagttgccctggcggttgttaatcttcgccaggccttccggggtggtatcggataccgggaaagttagatcacataatttttcaagtttctcttccagttcgtcacgatcttcgaaaagtttcaccatatcagattgcgataactcccctttgagcgcctgcttgttggcggacagcttcgccatgattttcttacgctccttcttgcgagactcgttaatgcgctcgacttcggcgacgatcggatcgatggccagcgagttaatggcagacttaccagcggaaggcggctgcgacgtgataacgtaaagcgttgtcggttgctcgctgccgtggtactcgacccaaaagcgacccatcatcgcggcggacacggttccgagaaagtgcatgtaagcggatgattccgggaactgaacagaacgcgctgcatttagcgccagcttgccgaccacatcgtaatcattggcgatcgagattgttgggtatttatccgcgtttacgtcgatatctttgggctttggccagaatgaaacggagtcacgatacccgttcgcacgaatcgcaacgcgcaggggactgatcccctccctttctgcgatggcgataatatcttgcggtgatacgcggtcatttaaaaacatgcccttgctcctgattggttaatcgttcggctaatcatatgccgtattaaatccgagatccagtgataatctaaacacgcttgaaaaacgcgcttggattatcggggcgcatggccccgaacccgtcacaggtatttagcttcgaaagtcgttccgtcagatacactgaagccaacttcctcgcggtacagcgtccagcggcatccgtcacggtcgaagatgtatccagcaaccgcaccgagcgcacgaccactttctacctggtagcgcttgccgacgctgaaggattttttcatcgggttgctatggtcaaggccgacgcattttagcgttttggttttgagttcgatgaacgtcgcaaccgccgctccgccgtctccagcaataaacaactcgccgctaacgcctaccgacaaaataatgcgcttcttcttcagttctacgttgtcatataccatcattgacacgttgccttcatcgtcgacgcgggcggaataaaggttgttttcatggatgttaacggcacggcttgacgtgcatttaatcttgattgacttcgccatttattttctttctcccatctcgatatacaggttaaccagatccagaaagtcagctttatttctgcaactcaatttaaagccaacgtgcgactcaattttattttgcatcgcagtcagggttgcgccaccattattcatcctgagaacttcgcggcatacttcggcgagtttttgagatatcatttcttcaccacctttatttccatgccttcgcaagcggccttgatatcattaatcagtcgattaagccttaaatcagtcattacatggtgatgacgaacatcaataatcccagcaacaactaacagcatgacggcaaagataaaaccaccaggcccggacatacacaaaatagttaacatcatcaagataataaatttcatttccgtttactccgtttcgtttcgatgtggtaatgctacccgactttcgccgggtagttttagcaattcgtgctattctcgataattcgcctggaacacggcgcgggcaaaacctcgcggagtaatggagcgcagcattttagtcctttctgaccttccgcccaaaaacttccaggcccaaaagaaattcacgccttctactccatccggcggagggagccgtttcggttcgacaaatccgtttccgtgccaaatgcacgttttcttcgtgtaattgtcgcaatggggcatcttgggatgccaaacaggctcatccggagaaacatagccgccgaagtcgcgcgggtgaaaatagaagtcaggcttgcgccatagtgacgacaattttccaaccgggttttctaccatccaggggcaaccatacttattgcctaattgctcgaccatcttcgcatcatctgcggctgatagaacgtcattatcttcccttacgtgcttgattccgctatgcgctaacagcgtgcatgacgggaacgcgaaaatgaagtcaggatctggaacgccgagaatcgatcgcttcacgtcaaaatccttgtcgatccaaatgttaacatactggatattggtgtgaaccattcgaatgctatattctccgtggtcgccggagtcggcattgaagcaatacaccttgcatcccttgatggcccacggcaggcccatgatgcctgagccgtcgaacatgcagtaaataaccttgtctttcatgctttccacgcctcaatgaacattctgttcgattccagcgtcagcgtgacgccagccagggaggactgaacgaggcgaccgcccggaaccgtcccgatgatgtagcggcctttcgacttcgtgatcgtgatctgagtgaagccggaggcgcggttcatgcggagaacgacgcggccatgcgcgttcaggacggcgagaatggaatcagtcttcggatggttcattgtgtagctccttcgcttgttggtgtggggatagtatgccactatcccgccatgttgttttagcaaaacgtgctatgccggaacgcaggtcgcgtaatcctggctgatgtagatcgtgcgctgaacgcgaggttcatgatcgccgagttcctggatggtaacatcgttgcttcctacccggcacggaaccgatccgaagataaactcgccagtctgcttgtcgttgatttgccatacattaccgccctcctttttgacaaccaggaaaggtgcgctgtctgcgctgaactcttccgggccacgaccgtagtaatgcgtgatcgcagctttggccgcagcactgaaggcatcggtaacgtcattggtcgccttgtcgcgcatggccttgatacgctcttccggcgatccgatgatgtaggaaaagctgttcgaaatggtaactgttcgcattatattttaacctcgttttggtggatgaagtcggcgacgtaatggcattcgatcggattctcgatacccgcgagcacctcgcacgacccgttattcagtagctggcaatgctggcactccgcgccgccaacactggcaatgacaatggcgatcccgttgcatgaaccgccaaacattctgtgcgggaaggggtaagcatcgcaggtgcaaaccacctccccggcccgccgtttcctcatacctggcccttctcgatgcagaaaacccaatcacgagcgtcaaccgcaaagcgtgcaatgccgtcgagaaccacgaagacggtaaatccattgacgccgcggcccttctcgatatctgttacggtacggaacagatcgcttgcgccatattgaattttatccccgacgactacatccgcgaatgctttcatgttgattctcctgactggtttcgatgggttaactataccaggcctcgcggcccggcgtttagcaattcgtgcttatttcactgctttcttcgctgccttgtacgcctctttgaaggccggaacatcttcgaccggaatccagaagccggagccataaccatcgtcatagcaagggcattggtcgcagtagtcgccccaggttttctcttcgccgccgacagagaatccagtggccatttcgcataacgcctcctcaaccgcttcgatcttgtcggcgtcgctatccatgataacgaagttccacttgccgttatactcgctgcccaggttgattgattcgcgttgaagtttcatagctttggcccctttggctcaattcgtttcgttgaagtcatcatagcaaagccgatcggatggcttttgacaaaaaatgctattcctgcgattgctgattattccactgattcggaatagtggaatatatggtgattgcacttgattccctggtgattagttttgacgaatcatgattgcttttgattgtttcattctgtgcaataacttggtggagtgtttcagtatttgcaacgaattgcatagatgtatgcaccatgcacgcaatttaccgatcgaagctggcagaactggagttgtgtttccccaacatttacgtcgtgtgggagtgtgggggagggataatcttacctaaaaattgcgcaaaaaatgaccaatataagcccatatatagatagtaagtatatgataaataataataatattattattactctttatctttatatatgtttggtaagatttctccggggaggttatggattactcttgcgcaagccataatttttagatgttccgccgcgaaaaaatgtacatagggatatataggtgatgacagcaaatcttcccaaacacgctgaaaccctttgacggcgcggcctgcggcctgtattatcatcttccgaaacattaccaaacgccgtaaatgtgggggaaacacaaatgcaatacaaaggctatgagttcgaagaagtcgacgtgtccgagtggatgaagtacgacgcagaaaagcaagccgcttaccatgaatggctgcaatccatcacgtttggcgacgccaccaggtcagccggacggagccaggaagcagcgaagacggaaggcacattcactggtaatcgttcgtccgagatccggcgcatgttcctggatggcgggcggcgtatccagatgacggcggaggagttcgtggagaagttcggcgttaatccggtcgacaaccacttccgcaggccgttgctgaaacttctggagccgggcgaggtgttgcgagtgagcctgggggcggggttaatctccgtctttaccgagttcgacgcaatgactggctcaaacctggaggctgaggcatacaggcggcagggcgctatctctgaacgggaaagaatccttgccatcattgacgaagtaatgcccggcggcatcatgctaaaaggctataagctggcactaatcgccaaaatcacaggagaataaccatgaaactatatccagaccaaaacgacccggcggcaccgatgcgcctgggcagcacgctaatcgacggacaggaggttatcgacgccatcgccactgcatcggacgacgaaaatccaaccgccctggagtgcgttacagccgacttgctgttaatgtcatttctgccgggatctgagtcgtatatccagcacatcaccgaggcgggccaggcagtgacgaaaccggaattcatcggcgcgtcgaacgtcctggccatgatggccgatgagtcggacaacatcattagcctcgactatccgcaatagcactttttgttaaaacccggtcagagcgatcgggtattatctcttcatcgacaacgaaccgaggacagcgaaatgattactctgatcacctgggaacacgaaaacagcaagccagaagtgcgcgagttcgataccgtagcggcgtgctacaaccttgcggcaaacggtggcttttacaaggcgcagatcgttaacgagttcggggttgtcgattatgaattttaaggcgagcgatgtaaaacctggcgcggtctacggatcgcgcctcaataaccgcctttggcgctgggacggcgaaactatgtggactaaaggcgagggcgatgttatctggcatgaatgcggctggccataccccgccatgagccgcctggatatcgcttattatctttcggttggcgacatgcacgaggtggaaagatagcactttttgctaaaacgccgatggcgagatccggtattatttacccatcgacaacgaactgaggtgatgaagatggataaggttatcaagatgagcgaagttaagccgggcatgatggttaagtttgctggcaaatttcgcctggttctcgcagcagatcgcaaggggaacattcttaccattcgcgttaatggaaaggcccaactcttcgcaccgcagtatgacattgaagttgaagttcgaatcaagtaagcaacctggaaatgaagatgagcaagaagaatccatattcaaccagcaactaccataacgaacacgtcatgcgctggcactggcagaagctcaaagatcgccaccttgcacgccagggaaaataatcacaatagcgccgcttcggtggcgctatatccaaccatcaacacggcaaacgccaggaggaatggccatgccacgattttcagcaacaaccaaacttcgcaccttcgccgggatgccgatcccatactcatcaaccaaagccgtccagggcagcgagcacggcgtatacttccactggttaggcaagtggcgcttcaccgtcattcgcggattttacgtgacctgcgatcgcgtggatattgcagaccattccggcggaaaccatattcatgagttcaagagtcacgaatagcactttttgctaaaacccgatcggggcaatgcgttattattaccccatcgaaacagaggagcaaaaacatgatcggcaaccacaacaacccactcaatgcagcatttcaccgtcgcgcggttgagcaacacttccacgcgctgaaagtggtctgcgacgaaatgaaagcaatgcttgaactgccgtcatgggatctgcaactcgaagactactatgacggccttcgcgtcaagcgtgatgatatcatcaaccgcctgcgcctggctggtatgttcctgtaaggagaacgcaatgattcacgaaattaagtctggaaagcaagtagtggccaccatcacgcagcgccacgttgtagccttccagattaacatccctggcacgttcgatatgcagtcgcttgacgtgccagtttgggcaaacacaatcgccgttgatgccgacggctcgatttgggcctacgagtcgaccgccgaagatgtttgcatcccggactactcgcgcaaagcatgggtggattgcgggccttccgaaaacaagatgcggtcagtcggggatatggattgcttccctgattgggcaaaatcgaagattgaccttcgcggcctgaaatagcacgaatagctaaacgcccggtcagaggatcgggcataatggccacacaccaaacaacggagattcaccatgattcgcacgaccaggccgctacccaataacctttacgccatgcttggggttcgcgcggcgagactgattcacgtcaacgaagttggcaacgtggctattttgtggtttaagcgccactcaagcggggttggcctgagcattgaaagattcgggcgctttaatggcaactcacaaacccactcccattgggcggatggaacttaccactggacgcacgttaagcacgtcaagaacttcgacgccaaatcactgagcgacgacgacgcctggaagatggtaacagacctctttggttatgatgcctgcatggaggtagttggatgatacgtttatcagacttcgatcgccactgcttaaccgggcagttcggcgaaaagccagtgatgtgcaagatctcgaaggtcaacggcgaccatatcgagcaggtcaacacgcttaggggcctggcgatgcgcaaccgcctttacatccaggcacgcggcgacctgttcgcaaagcaggttcattttgcgtatgggacaggtttccacactggcggagatgggattaacccagcgccgaagaaggttaggccgcgcgagataatcgagttcggctatgtttggactaacgggatctactaatggaaacggttaaagtaatttgcacgcacgtcggctattcgccgctatccacctatttcacacctggccgtgagtatgacgccaggttcggccctggccttgatgaagtatggattttgcaggatgaccagggaaccacggaagaagaagaattttggccagcctgccgtatgccggacgaaaagatcgcaatgtacgccaaccgaccctacgaaaacaacgttttgtttgaggtgaaaatatgaaagtaagcaaaaagaaactcgcgctgtattgggccttcttcctggttggcctggcactgcatgaccacgtaggctggcagacgatcggaatgctgtgcatgattattggcgtatgccgcctgtcggagattaacgggttccgccggggatatcgggcagcattcagcggtgaaaaagaatagcactttttgttaaaactgccgtaacgtcatttgataaagtggcgttactgaagtgaaacaatccaatcaggagcaacgcaatgaacgacaatttaatcgcactgctggaagaactgaattcctacggctgtgcatacatcgagctttcgagcgagcaggttattgaagtcgcaatcgacgatgacgccgggtttaccagattaagggtggcggcaggggccgaagaggaattcgaggactgcggcatccgtgaagtaaccaaccttcttgaatccaaccaggtgaaggagatccgctaatgaacaccgtcaaacttatggttgtcaatgcggcccgcgaacgtgagcgccaccttatcggctgcgtattcgatgccgtcgaggtgcacgaaccacttggcactgtgcacgtaatccagggaggatacctgaacgaattcatcgtcaacccgctggacaccgacgaagattcgaccatccgtgttggcggcgagccggaaaacgcgcttttccacctgcggaaagtatcgaaggcgtcgcagcgcaagttgctggttcgcgcactgaagcgcatagcgaagcagcgcggatacaccgacgcatacatccgcaagttcggcacgttcgctggcgtaggcgattgggcgcggtcatgggccgacttttacttcaacaaatccggcgaattctgtgccgcgcatacggactggctgcatggaaccgaacacgatcccgtaaacggccacgagtggtacgaattcattgaggcggaattagacgccctttaatggcacgaattgctaaaacgaacgtccggggatggtgcatactatccccacactaacaagagatggagcctaaccatgaacaccacacaaatcatacacctgatcccgtccgacaacttcaccaaagacgacgacccgctgttagccgccgttattcgcgccgggatcgattgggcgctgagtgatgcctcgtgcgaatcattcatgcgtgaaccattctcacgaatcgcggagcttgaaaagcaagttgcgttcctgactggtgaacttcaggcggctatcgctacgatcgagaaggttcgggaaatcatgcgcaccgaacctggctatgacgttgaagatcacgcgcgagttttgcgcatgatggccgatgctttcgcaaagctccagcaatagcacgaaccacaaacacgaaccggggttgctgcatggcaaccccatcaaagataaggaaaacatcatgatttacgcaattattgccctggtggttcttgttctgtccctgtatgcgtgcggctgtttcctcatgcgggccttcctgaaatctgcggattctaccgacaaggaagatctttatcctgtgctttgctggccctggattacactttccgccgttggcagcgtgatcatttcccgcaattttaagtggtgagatggcgcttgggttccaaaaattgatgcccgccaaatagcacgaattgctaaaaccgatcaggggtaagctggtatagttaccccatcgaaacgaaacggagttacagcaatgaaaatcaaaatcaccaaaatcgacacgctcaacggcgacggctcaattacactggaagaatgcggcctcaaaatcggcgacgttcttgaggtcgacggccacttcaatgatggctcatactgcgtaattgccccgcgcaatagcgagtttatccaggctggtgacaatatcagcgtgagcgaagacgaatgcgaggttgtggaagaatgagcaacaaaatttgggtactgacctacactatcggaaccaacgaggggcgcaagtcgcaccgcctcatctgcgacaccaaagagcaggcgattatgcagcaaaccgttcttggtggcgatcttgtcgaatatttccgcaagcctgaagcgtttaaggtgaactggccggaaggcatggatatcaacggcgcgttagcgagcctgcgtgagatgcagcacaacccgaagacgtggagcgactttcaatgcctgcgggcggagccggaagtgaaggccgacctgttcaccaacattcggtcgcagcacgcggagtggtcggatcgccagttcggtaacgtcgggccagtcgggccgctcaagcacctggcgaaagaggctatcgaggccgccgaagcgccggatgacattagcgagttcgccgatatcatcatgttggtatgggacgcaacacgccgcgccggattcagcgatgagcagttggctgaagcggtggcggaaaagctggaacggaacaagcgtcgtgcgtggggcgaggtcaaagatggcgaaccttgccaccacgtgaaaaattaacgaaatcgaataccgtttaaagcgcctgtaagccattatggcgggcgcaaatttaaggagtgcgattgtatgcctgaatactcaaaagtcgaagatatgccgattggcgcaacgattacgggtatctgtatgagtgagtcggtcgacgccatcaagccgctggcgttcccggttacgcaggtggagacggacagcagaaaagggttcatcttcatctacaaaaatttcaatagtccgctgcgtgttgaagtgttcattgctcgcggaacctgggtggagtgggagaaggccaaatgttcggactgaatgaagcgcagtacaacgccgtgaagcgcatagcaaagcagatggccgcagaaacaaaagacgccatcaagaaggacaagaagacctacgatcaggtcgccgcgaagatgatcgataaacattgggcgcaaatcaacacgctggttactcgcggccagtttatctggatagctggctacctggaaggtcgattcggtcgcagggatggcgagtatgaataaaaaacagccaaacgattcagcgacctattgacgcaatcgcgctgaccggggtaacgtgaaccacgtagacacaagaggcggtaaacatccgcaagtctcgccccgcttaggggcatttacaaaggggttatgatgcagtacaaaatcatactcacggcaagaaaaatgggcggcttttgcaagtcctgcattcaagagttcagcatgacgattgaggcgaacgacgccgccgacgcggtggagaaagcaaaaaagcaatccggcgtcaatctggatacgcataaaatcaacatcaactacataagggaagtaaatcaatgttaactctgtttattgcactgttaatgctgttcataggctatcacgttggcgcggctcatcttgtcgagcgcctttcaaagcgggtacatgaaggcacttttgctgccatgttctacaataagaaaacagcacgttgggaaaaagttggcgacccggaaggtgtcgcaaaacgaatagccttttcgccgcttccgtatgttgactgcgagcctttcgtgaaactccagaagacgctgaatcggcgaaacaaactgatataacacaagaacccgcttcggcgggtttttttatgcccgcaatctgatatactcgcaaatcaacatagaaggagggtgcaaa

SEQ ID NO: 36 - DNA, 164356 bp, unidentified
  source 1..164356: mol_type = genomic DNA
atgctcttctcattttttagtccgatagattattctgcaaagaccgtaaaaggtgctaaggcaaaagctatcccaaccgctgacatatttcgtaattatcgcaaatatttcgacactgtagcagaaaactatcttttacaaacatattacataagtggagctcctagaccagaagaattagcatatattctttatggaaatagtcagctgtactggattcttttaatgtgtaataacgtatatgacccgtttagagattggattaaaacccaagatgcatgctatcaatttgcgcagcaaaaatatgcagatgtaggtggagaccaaatactctatcacgtggatgcaaacggcaatcgttattataacctcgagcaatatcctgaaaattcaggcatttggtatgataaaggggactttaatcatcagtaccctcaatatactggggctttagctggtgttgacatttatgaagactctattatagaaaatgaaaaactgcgccaaataaacattatcaatcctagtgatattgaagcatttctttctgatattatacgagaaatggaaaaagcacctgacagcgaatacgaatcaggccgatacaaatcccagactaccatcggagaagttttatgattgaaatgaacgattcattaaaatggtttactggtgttgttgaagacagacaagacccgttaaagcaaggaagagtgcgagtacgcgtttacgggcttcatccgtttgaaaaggtgcaaggagctataactggtcttcctaccgaagaccttccttggatgtcagtgattcagcctacaaactcagctggaatttccggagttggctcatctataaccggaatggttgaaggaacatctgtatttggcttatggcttgatgaattcaaaacagcaggattagtaataggaacatattctgcgcacagaaaaactaagccaaactacacggaaggtttttctgaccccacaggtcaatatcctagacaggttgggtcagatactaacccactagttcaaggcgatgaaactgggtatagtgctgtaccaaatatcatccaagatagaaacttggatattggcattaatcctgacgatgctgacctaagcgatattcctgaagacccaaatcctgcaattacaataacagatatgcttaatagggatgaaggtcttagattgaaggtctactgggacacagaaggatatcctaccataggtattgggcatcttatcatggcgcaaaaagtacgtgatatgtctgtcatcaataaaacattatcaaatcaggttggtcgtaccgttacaggaaatcctggtatcattacaatggacgaagcagttgcactatttaagaaagaccgtgataaaatgctttctgacattaaaacaaattcacgggtaggacctgtatatgctaaagtcaacaagtcaaggcagatggctttagaaaatatgagctttcaaatgggtgtaggcggtttagcaaaatttggtaaaatgcttgatgccatgttcattggtgattggaaaaccgcttatacagaagcaagaaactctgtttggtttaatcagacaaaaggtcgtgcttctcgtgtttccatgattattctaacgggtaatatggaatcatatggagttcctgctccaaagccagaaggaaaaaacctgtctgctgcttacgtagaaccaaagtctggaggtaatcctgaagacccatggactccggaagattcaagaattcttttcaaagaacctgagtcttcatataatggtcagtatccatatgttcacacaatggaaacagaatcaggtcatatccaagagtttgatgatacacctggctatgaacgttatcgtattgttcacccaacaggttcatacgaagaagtagctcccgatggacgccgtaccagaaaaactgtagctgatttatatgacatgactcagggtgatggaaatattttaatctctggggataagaaggttaacgttggagggaacgagacctattataacatgtataatcgtcgacagcaaattgatggcgataacacgctttatgtacgtggaaatgaaaccaaaactattgaaggcgatggtactatttttgtcaagggtaacattaagatagtcgttgaaggaaatgctgatatccaagtcaacggtgatgccactactaaagtagatggcaaccacgacgtaaccgtcggtggtaacttaacttggcaagtagcaggtactgtgaattggaatgttggtggggcttggactgagacaatggcttctatgagctcaatcgcccaaggtcaatacactgttgatggttcacgaattgatgtaggttaatcatggctgatatacttcctattaatacaacgttacgcgaagtaatagaaggtgaatacgttgagcagtactttactgctcaattatctaccaacgaaacattaaaatcaataaatattatcgactatcaaccagtatctgatatctctgtgtctgaaacctattataaaggtaattataactcagtttttacttttggaaacgatgtgcttaaataccgtgaaggcgatgagctaaagtccgcttcagcgtgggaggatttacctaatcccaaaactgctgatttatacctgtggaaagcccccagaacactagagaagacatttacctatacagttgagataatatatacagtgacagaagaatcgtctggaggttcatccggaggttctagtgctccaatcgtaacagaacataaaaagcaaaaggtttactctcaaaccgttaaaggtaactggagcagatggggcgaccaacttcgtgcttacgtatatgcggggaattaaatggctggtctttcatatgataaatgcgtaactgccgggcatagtgcgtatcctccgacagaagtaaatgctacacaaagtaaagtattcactggtggaatagcggtattagttgatggtgactcaattacaccgcacaccaagacggttgaccctcatgatacgcatggaggggttgttcaacctcgcacatccaaggtatttgtaacaggcaaaaaagctgttcaaatggccgatccaatttcttgcggcgacactgtcgcgcaatcaagctcaaaggtattcatacactaatggctattaaagaacctttaaattatcagttaacgcgtactgcaaacgctatcccagacgcatttactggagcaacattcgatgaaattaaaaatcagcttattaactggcttagcggtcaaaaagagtttcaggactttgattttgctggttcgcgtttaaacgtgctattagacttattagcatataacacgctttacatacagcaatttagtaatactgctttatacgaaagctttatcggaacagctaacttgagaagttccgttgttcaagcagctcagcaaaacgggtatttgccaagttccaaatcagcggctactgcgtctattatgcttgaggtaactcatccaaatccagagccagcaataaaaatacctcgtggaactaagtttttggcatatgcgcgggattcatcagtagacccatacaactttgtcgttactgaaaatgttattgcgctaagagatacttcagcaccagaaggagttaataggtatcttcctattgtcaatttggcacaaggacgtattattcgtactcaattgtcatatgacccgaagaaacctattgttattcgtgatcagtcgattgaccgtaagcaggttaagctgtgggttgatggcgctgaatggactaactggacagacagatcaatggttcatgcttcatccatttcaacaatttattatatgcgtgaaactgtcgacggaaataccgaattcttctttggtgaaggcgtggcagaagcctctgtagcaggaggagttcttgaaagtaatttcattggtggattaaaacctactaagggcgcgcaggtagttattgaatatattcgtactgatggtgaatctgcgaatggcgcaactgatttcagctatgctgatactctgcaatatattgtagtaaacaaaatcatcgaaaactggtcggattctcctgactacgttggagctgatggtggtggggaacctgaagacattgaacgtattcgcgaattagcacaaattaagcgtgaatctcaaatgcgttgcgtgtctaaaactgactatgaatcattcgttagttcacgctttggttctatcgtacaagcagtgcaatgctttactgatcaggacaaaccaggatatgcatttatcgcaattaaaccaaaatctgggttgcagttaactgcggttcaacgtgaagacattcaggattatcttcgtccattctgtcttgctcccattaccccttcggtaatgagtccagactacttgttcatccgtcacaatattaaagcttcttatgcattgaataagttgcaagaatcagagcagtggttacagtcaaaaattatagactcgattaatagatattacgttgatgaagttgaaatgttcaacaaaaatttcagtaaatctaagttgttgacttacattgatgacactgaccactcaatcatcggttcttctgtggatattcagatggttcgtgaaattgtcaactatttcactcttcctagcgcaggtattaaatactataatactattactccgcggacgttacgttctggtgatttggtctttactgttaccccaactgctgaaccgtattcagttaatatcgttggaactgacccagataaaaatggcaaaggaaatatggttattggaccgtttaagccaggtgatattaaagagaatactcatattcagccatatactgaagacgattttgatagaactactaatggagaaagaactcgttggtacaaaatcggtgaagtagattattatggtgataacatttactggagccttggagctattggagccgatcctcttcagtttgaagaccaaagtattgagctttattctactcctactcaggatatcgtcttcgcccgcgatggaacacttatcgtatttgagaatgatcttcgtcctcaatacacaactattaaattggagcctattactcaatgacaattgcaccgttcgtcaccagcttacgaattcataagctatctgcgaatcaggtcaatattcgttgggatgacgttggtgcaaacttctactattttgtagaactggccgaaactcgaaacagagcgggggaagttatccccgctgataacttgagttggtcttcactgggttataccgcggataatgattggttcgagcaaaatcgtattgaaccgcttacttattataaaatgcgtgttcaaactacgtcagcaggatttgaaccgtctgaatgggttgaaacagaagagttccaaacttttgaagaaaacgcatacacatttgagcatatgcaagaattcagtttagtgaaagaattcattaaacagaagttttctttaaacaacatgtcgtatgttaacttcaacacatctgccatgatggcatctttgatgactgagtcttttcagtttagtcctgaatattctcatttatcagctattgaaaacttcgttgtaggtgaatctggatatcatgaaattcagggacctattgaagcagtgtgtgttgataaaaatagaactatgctgggagaaatagacggaattttgtatctgtttgaaagattccaacatatggttaaagtatcaaatgataaaggacagaattggcaatacgttcagttatttaatgaccgcgtcggaaatccggtttctagagtggtaatttatcaatctaaaactacttcttatgttttaggatatgataaaatcttttacggaaggaaatcatctgacgtacgttggtcatcgaatgaagttaagtttagcgataacgaagttacatttgctaaattgggagaccagttaaagcttggatttgaagtagagttattcggaacgtatgcatcattgcccgctgacgttaccaaatatgctgaagcgtttacatgtaatgatgactatttgtacgttgttgcaaaagacactgtccgtaaagttaaattaaaagatgctccaatagatactgaccctttaagtcctacatttggtgaaaaggtgtttgaaaaggaagtatctcatataacaggcaatcctaaatctgtatgctttaaaatggattccgttggaggcaaaatctttgccattattaccggggaagttaaaaccttaggattagacccaacagacccaagtaacgttgtggattctgcaactaaaggcgtctatgtttaccaagaaggcacaaatacttggaagcgtgtatttggtaataccgatgaagaaaaacgtcgtatagagcatttatggacttctatgtcaactgacggaaaggaaatattcttttcatcagctaattttaagacaacagagtacgctcaggatattgagcttgagacgaaatatccagaactaatttctaccgcagttaaaaatgttaatccaattcagtatcactctgataagcattatcacatgatgagtttcagagcagatgaattttcaagatgggaaacatttgttcctggacctatgaggttttatgctgaaccttggtttgtctggatggctcgtgaaggcaacagatgctggataagtacagctgaccatgcagttgtcatttataatgatattctttatcaaaaaagagtagatacagcggcgcagggaactaccgagcgcattctttcggaagtgtgggataaaggcgacgcgacgttttattgccctccggtttcatttaatggatttttgcagtatgcttctggcatcatgtttcacgaaccagacggaaaactgataggctattacgcatttgactatcgtgttcgtgaccaggtaacgcttaactggaaaccaactgatgtaatgtttaaggcgtttctgcagaaccaaacacgggaagaagactggacacctgaacatactccaggcttacgtgacccagatttgcgtccgtatcttactaaaatgatgccggatagttacttgctacaagatagtaattttgagcacttttgtaagtattatctccaattcctttcagacggaaatggaacgcattacaacagtctcgttaatcttgttaagaacaaatatcctcgcgaagaaaatgcatgggaatatctgtggtcagaagtttataaacgcaacatttatctgagtaaagacgctcgcgatgctgttgtccgtttctttgaagcccgtaagaatgatttctatgctaccaaaggaattgaagactcatacaaattcttgtttaaacttctttataatgaagatgttgaaattgacatcgagtcaaagaatacgacagaatatgacattatcgtagagagtacaaatatttctgatgatttagttggtcgtacgatttatactgcttccggtcgtagtaatgtgacttatatcgagagagaataccgggatggtcgtctgttatggcgtattactattcataacttatcaggacggttcattgaaggccaggaaattaaatcagagcgtacggactttgagggtattatagttcaaggtgtccgtggaaaggatatgctgagtaataacattgattatataaaccgcagccgttcttactatgttatgaaaattaagtctcagcttcctacttctcgtttccgcgacgatgtattaaggtttgttcatccggtaggtttcggtttcattggtataacattgctgacaatgtttatcaatagtggcttaaatatgaagcatgttgagactatcataaataaactcaaaaactataaatgggatgcaggactgccatcagtttatcctgatagagttgctattatcgcttcagatgatacaatagaaagagacccaataaccaatgagcctaggtattcttcacgtgctcaagctggtgaacctttcccgttacctgctaactataatcaagaaaataacaatagtgttatcgctggacaaaaccctggacaacgacgtaagccgttaagtcctacgtttgaccaatcagcagtaacgtttgctaattatcgcgatttagttaaccaacgtcttaaagacgatgcaggtaatcctcgcgatcctgaaaatccgccacaggtaaaaattgatgagtaattcaacaagagcaagttcaacgcgtagcacgatttatcgtgctatcattacatctaagtttagaactgaaaagatgtacacattttataaatcgattggtccgggaacggaccaaaacacgttgtatgtttcatttggtaaaagcactccgtggtcagataacgaatctgaacctgggtttgcacctccatacccggccgataatgaagacggtgtggttgatatttggacaaatatgatgggtgcagtcaaaattgaatcatctatgcttgactgtgttgttccaagaagagactggggagatacaagatatcctaatccacgcacatttttaatcggcgatatcgttgttgctaactctgcgccatataacagaactgatgctggatttggatggatggtatatagatgtattgatgttccaaagaatggaatgtgttcaattggtaatcttacaagcaaagaagaatgtattaagcttgggggtaaatggacaccatccactatttccggttcagcgcctcgtgggcgtggtgatgcaaacggtaccgtcgatttgggtgatggatatctttgggaatatctatatgaaattccagccgacgtatcaattaacagatgtacaaatgaatatatcgtagttccttggccagaagagattgaagaatctccagctcgttggggatttcaaaacaacttaacttggcaacaaaacgactttaacctaatctatcgtatgaagtgtaatacgattagatttaaagcataccttgatgcaatttattttccggagtttagtcttccgggaaatactgggtttaggcagttgtcaattataactaatccgcttgaagttaagccaatgccaaattctcctaacgttaaggctgaaaaaggttggtatagcgcttctggtcttgaaagacagtcaggtgaaatgatttacatggaaaatcggcaacctattatacgttcaatggaccaaacagaagagttaaatttaattttcgagttttaattatggggagcctttggctccccatttttatataaataagactatactttgatatgaggttaacctatgtatacagataagggtaaaaaaataattgacgtcggtgagattggtaatgcttctaccggcgacattctgtatgatggcggtgtgaaaattaatgataacttcgacgccatttataacgccttcgctgatcaacgattatttgcagctggtggtggagctttaaaccaaaaaatccacgcaacaagttattaccaaaagataaaatttggagatgctaactctgcagggacagttccaatggggtcatgcatagatgctgattgctcagaaggggcagttcaaattcgtctttcaaaaggtaaagcgggagaagctgtattcgttgtaaatagtaatggctcagcatcaaaagctagatccataaaaataacaacaaacggcgaaggtgtagcagatgcatttaaagatggatcgcgagaattgattatcaacacaccaagatgtagaattgagctatggtgcattgaagtcaaagctaacggtgctgcagtttgggattattcgatttcaagtatgtttggcagcacgtattcaccgttagaagctacatataatttaacgagttctcctattaatattcggcttggatataacgatgattactctactgttaaattgttattaagcttcagcgcaaatccaggtggtcaaaccatcaaaaggcaatcatctgaagtcatgcttatgattgacccgactattacttcatcagcgccaaacggaagagtatttgacactgaatatgcagtgttaagaagcggtgaatcatctgaaaatgaaaagatgtattctatttcatactctattaacgcgcagaaagatttaatatgcacagcttcaacatcttatggaaacgcacgtttggcagttaaagttattgctacacagaccgtaggggtatctcaataatgaaacaaaatttgatagtaggccaatcagtagatgatgggtctggtgattacctccgtaaaggtggtcttaaaattaataacaactttgatgatttatattcagagttaggtgatggttcagttccattcgcagcaggtgcatggaaaacttttaaagctagccctactggaactactttaaatgctaagtttggtcaggcctttgctattaatacccaggcagcaagagttaacgttcagcttccaaagggtacagccaacgactataacaaagttattaaacttcgtgatgtttggtcaacctggcgattaagcccaatcactgttattcctgctcaaggcgatacattaaaaggttcagcttctcctaaagttttcaatactaacttccaagatttggaattagtttattgcgcccctggccgctgggaatatattgaaaataaaactgtagataagctaactaatggcaacttaagtactgtagcgaaaaaatcaattattgctactgcgggtcagactgactttcttaacatttttgatggcgtagattataacgaagactcgcttaatgtatatcgtcgtggtaatattttatattacggtgaaaccagcgttatggataaagccaatgctgattacggttctcctggaacagtagcaggtcaattggtagaattaaacggtaaagacattcgtttaaaagttccatgtgttgaaggggaagtaataacatttgaaaccttcctagatggaattggtgtttatcggtcttcatacaacaagttggctatccagatacgagattcagcccagactacatccaagacgattcctgggtcaatgatagtagataaccttgctactctccgcagaatcactctggatgacatgggtgtacttccaggcgtaggggtaaatcctaactcgcttgaaatttcattgaacggaaaggaattactcgaagctggaactgcaggtcttcctttattttattgtgaaggcgcggaaggtggatatgcagaagactgtataaacaatggtggtcaatgggtaaattctaaccaagattatagactggaatttgactcaactggtactaacgtcgaagctattatttttggtgaggcgtttgaagataaagaccttcttaccgtccgttggttcaataataacatcggtactactatggatattgacgatatcatggcagaaaccgaccaagtgtatatgaatgctgagcaattagtaactctaaaaaatcgcattgaatacacaaattatgatgaacctaatcagaaaaatatgcgtccggttgctgacgatattatgattaaagtcaataatattgcagcgttttttgacgtaatttatccgattggcacgatttatgaaaacgctcacaaccacgcaaaccctgctgactatatgggatttggggtgtggaagctttattcacaaggccgtgttactgctggttggaataatgattcatctgatccttatttttcgcgtaacaacaataacttaaacgaaaatggtcagccatcattaacagcaggtggaacggttggagatttgacatttacgttaggaaaagaacacattcctgaactaatgtcaagagataaagttctaatttcagaccctgaacatggaagcgtagttatcggtggatgtcaattagacccagacgcgcagggaccaggttattctaaataccgtgaagacactgttgcggtaaacaacggtgtagttccaaatgacatcactaaaattcagccaacaatcaccgtttatcgttggattagggtaggttaaaatgacgattgaaactaaaactcgtgaaggagctaaagttaattcaagattagctgctttttcagaatatcgcgttgacccgcaaaatattgcggtaggaaatacggctcctatagggagcctaacctttgaacaaatggatttaggggtttggtatccaaatactgaagctgctattaatgatttgatgtcattgcagtcagcagaaattggaactattatttgcaatgacactggaatatctccacagcccgcacagcaaattacgcgtgctactttttcaggtgtcgttgcgttagagccaaaagaagacggctctgtcggtgacccagtaataattcatattcttggcttaccaattagaattgcaaacggtgatgactttgcagcagtagcaacacgttggtatgataaagtaaaagaattagaagctgttggaaaggttgttcaacaggttactcaatcgccggcaacacctcattatgttgatattattcatttagattatcagaaccataattttgaaacatataaaaagtatggtttaactgttgaatttactattacttcaccagctaaagcaggttatgggcaatgggatgctatcggcaacgaatctaaaaccttcggcgcgaacacatttactttccactattttagaaggatgggataatggcccagaataactataatcactacagtgatttggccaaatatacgatatttgacccaacaaatacacaatggcctgttgctataaaagacgtccaatcagcgttagagctgattggtagctgggcaagaactgataccggattacctgtagcatctcctacagtagccggtgtaattcgcacagcaacacaggctgaagttgatgctggaactattggtaatgctgcggtaactcctgctacattaaaatccacagttacccgtcctgaagcaactacagcaattcttggcttaacacggtatgctactaatactgaagccgcagcattaactgcaggaaatagaactattaccgcggcggctctcggtcatgtgtttaaaactgtgaaagcccaagaaaacgtagatggaactgttaggttaactactgcggctcaagcacaagcaggaactgacgaaactaccgcagtaactcctaagcgtgttgtagaaatgattggaaagttcagtgtcagtcctcctagttatacctctgcgacagaaagcaacttgggattagttcgtgtcgcaacccaagcccaggtagcagcaggtgctgttcacgatggatacgcagtaactccaaaaaccttcatggaatcaaaagcgtctgacagtgtatttggtatagtaaaatttgctaaagactcagatgtggcttcagctacttctaacaatttggctgttactccaaaaagtcttcaagcgctaaaatccaccaaggataaatatggattaaccagattatcaggttctccaactactgatgcttcattggcagcggctgcaacagatgcagtctttaaaacccgtagaataaacggaaaaactcttgataatgacataacgattactaacaatgatattaattgttatacaagacaagaatctgacgggcgttacatgccagctggaaccagagtaggtaatgttacttgggttgaaggacaatcttggattagtcgaggtgcaacgtttacatgtaatgcaccatgggaagcttctagtagattagctctaaatgttaatgtaaaatttgagcgtaacaacgacggatatgacaatcgtattttcaaatttgttgtaatagttaacggttcccaatggggcggtgaacttactcttaacatcgaaaatactaaaggcggaaaaaatggtcattcatggagatttgaagcttacgcatctagcaactttttcttcaataacattcctccaaatgccactgttcaaataagaccaacagaagacagtcgtattgtattttatgactgcatgcttacattctgtacaaatagaccgtaaggaataatatgaccaaactagtagattcgcttccgtttgtagacggaattccagacgattttcaacagagaattaattggataaaaaatacagagcctcttaatggggcttcaacccgctatggaaatgatggagaactgaatagagcctctgtgcagattcagaaaaacgttgttcaggtacataacgatttgaacaacgttggaactgctgtagaaaatattcaagtagatgtagaccaaatcaaaaaatcgttagaaattacaggttcttctgacgccattgagcaggtttatatcaacaaaaagaatattgaagcccacagtgagaacattcttaaattagaagaagacactacaaagattcgaactgacctcgattttcttgaagaggatgtaggtgtttatgattctagtaaagatgactattacagaacagttcgtgataatatagtttgggttaaacgtgaaattggtgcgtatcctgggcaagatattaacggacagcctaagcaagacgctccaggttctggtatgaaataccgaatcatcaataatgcgtcagctatagtaaaacatgacgagcgtattcaggcgctagaggatgcatacaatgattcagacgtgggttctctgactattgaagtaaacgacctgcgtaaagaagttggtcctaaatccggagctacgtcagcttcaatttatgcaaggcttgtgaataacgctgatgctatttccgcagctaataatgaaatctttgctattaaccaagccattgattttaccaatccagtaaaaattggagctcgtactactagattagaaaacgattatcgtatagttgacgcaacacttaactctgcacaaaccgggttagttcctcgtgtcaataatattgatgctcgtttggggtcttctgataagcctgatactattgaaggaaaaattagttctctttcaactgaccaagggtacatttctgatgttgtaggacgtgatacttcatcagggcttcagggccaagtagcatggataaatcagcaggttggtattgttcctggcgggcagccgattcctccggggtcaattttagcgagaatgaccaatgttgaaggtatgcaaaactctcaacagtctgctattcaggacattcaagtagaacttggcaataacagcgaagggttaaaaggttctgtaattacgttacagactcaaatgaatggtgacttttcgtcagaaaatccggttcagcgggatggtgtgtatgccactgtagtagaattgcaagataaattcgtgactgcagttactgacgtagaacaagatggagcatacctccgtaaacggggcgaatggtttaagaagccttcatcaataggtgaattcagtaaagaagatttcactgttgatttaagttctgatgcattggtaaatcctaactcattggtcgctgcttcatttaatgctggcattcgtattgttgatgatattattgttgatgacgatggcgtattttgtgtagaaactgatacagttatcgaagcttctgattcagataaaggcgtgaaaattgtagttctcgttaataacattgaggtgttttcatacggacttggtgttaaggcggtaaccggcgagcagctgttgaaaaccaagaaacttattaagttttcgtctggcgatgcaatcaaaattgtatatagagctgcttcagaagaatcaaaagttcctgttagtattaaatcattggatattactattcatccagcagtataatgaaagggaccttcgggtccctttttcgtataaatagaatataaagaggagcttatatgtcatacaacacatacaacccaaaaacgcttaaagacgctatacttcgacgtctaggagcgccggtaattaatgtcgaagtaactgaagaccaaatttatgattgtattcaacgagcattagagttgtatggtgaataccactttaacggattgaataaaggctatcaagttttttatattggaaaagatgaagctgataatgaaagattcttgaatggcgtatttgatttacgtggtcgtaatgtatttgctgtcactcaaatcgttagaacaaatgtaggttcattaacttcaatggatggtaatgctacctatccgtggtttactgactttttaatgggaatggccggaattaatggtggaatggggtcaagttgtaataagagttatggaccaaacgctttcggtgctgacctgggctattttactcaattaatgacttattggtcaatgatgcaggatttgcttgccccacttccagactattggtataactctgataatgaaatgcttaaagtaatgggcaacttcatgaagggagacatcattgtttgtgaatgttggactaaatcatttatgaataccgacatgatggtaggtaatactgcaggttacggatttgccgggccgcaaactgttgatcattggggcttaggagataggtatcagaatcctgaccttcgcaataacggccaatatgcaggtgaaggtaatacaaatagagaaggtgcttataataatcgttgggtaaaagattatgctacagcactgactaaaaaattgtggggtgaaattctgtttaaacaccaagggctacaattagccggcggcgttacagttgatggccaaacacttaaagtagaggcccaagaagaaatcgagaggctccgagaggaacttgatttacttgacccgggttgtcctattctgttggggtaaaagatgactacatttaattctagtttattcgctcgccttgaggattaccgaggatacaataaaactaatgagacagaaattctcaatccttatgtgaatttttataatcacagaaatagccaaacgttagcagatgttttatcagctgaggctattcaaatgagaggaattgagttttatttccttcctcgcgaatataacaatccggatttgcttttcggagaagacccatcaagtaaattcaccaaggcttggaaatttgctgcttacttagactcttttgacggttattctggtgataacacgttcttcagtaaatttggtatgatggttaatgatgaagtcaatttgactattaatcctaatttgttcaagcatcagaccaataattcagaaccaaaggcaggtgacctgatttatttcccgatggataattcgctgtttgaaattaattgggttcaaccatatgatccattttatcagttaggtcaaaatgttcaacgtaagattactgcgcagaaatacatttattctggtgagcagcttcaaccagaattgcagcgcaatgaaggaattatcattcctgagttctctgaacttgatttagaaccaatcaaaaacattgattctcttgctgatatttctgacgtacaatacgcagaaagcgatgcaattaataaagaagcctctgaatatgttcatccgtattatgttaataacggaagaggacttgagtctcctcctaaagcagattcgtttgatgacggattttttgaataaataaaataaagatgggacctttgggtcccttaggagaaatcatgtttggacattggtataattcgtccttacgccgatacattgtattgcttggagatttattttctcatgtacaaattgctcgttggcgtgaagacactggactaaaatatattaaagtacctatcacttatgcttcaaaggaaaagttcctttctcaactcggaaaatggactgctatccagtctaccgagaataaagcaaagatagaaaccgttttgccaagaatgaatttgcacttggttgatatgcaatacaacgcgatgtataaaacatcacagttgaatagaaccaaatcatataaaaccccttcaaaaattacatctcagtataatcctactccgattaagatgatttttgaattgggaatttatacgcgcaaccaagatgatatgtatcaaatcatcgagcaaatcgttccttattttcagccgcattttaacacgactataactgaactttacgacaaagacacgagctttaaccgtgatgttagaattgtattacaatcattttctcaggatgaagctgttgacggagataatattactcgtcgtagattagaatggtcattgatgtttgaagtcaacggatggctatatcctcctgttgccgaggttgacggcgaaattagaaccatttatttggatttcttcgctaatagtaaagaattaacaccagaaggaaattttgaatctgtggatagcgaagttactccacgtgatgtccagcaagaaaactgggatggttctagcaaacagacgtattctcatgatattcctattccggtaaatccggaggctcctggaccgagaggtgaaaaatgagtgacttacaattagatatggctaaattactagacatcgaaggaattcccggaatagaaggccaagaaattccggtttatgaaaaattagaattagtcgaagttaaatctaatccaaatgatcgtaaacctgacctcgaagacgactattctgtcgttcgtaagaatatgcacttccaacaacagatgttaatggacgcagctaaaatatttttggaaactgcaaagaacgctgattctcctagacatatggaagtatttgcaactcttatgggtcagatgaccacaactaacaaagaaattcttaagcttcataaagaaatgaaagacattacttctgagcaggttagtactggaaaaggagctaatcctcaacaaggaatgaatattcaaaacgcaacagtctttgtaggttctactgccgatatgatggatgagtttggagacgcctatgaagcacaagaagctcgagagaaaatagtaaatggaacagactcaaccgtttaacgttctgagtgatgcacatcctttaaatgacggtaaacaagtggttattcgccacccgtctgaaatggaaactaaaattgaaaatggagttcgtttctttaaatcgcaatgggatgataagtggtatcctgagaaatttgaagactatcttaagctgcatgggatagttaaaattcgcctgcaaggtgaagacccagcgcattttcaaacgtttaaggataaaaataataagcgcactcgttatatgggattgcctaaccttaaacgagcaaacattaaaatgcaactaacccgtgaaatagttgcagaatggaagaaatgccgagacgatattgtgtacttcgcagagacctactgcgcaattacacatattgactatggtactatcaaagtccagctccgtgattaccagagggacatgctggaaatcatggcggctaaacgtatgacttgttgtaaccttagtcgccagcttggtaaaaccactgtagtagcaatattccttgcgcactttgtctgttttaacaaggataaagcggtaggtattcttgcgcataaaggctcaatgtctgcggaagttctcgaccgtactaagcaagcaattgaattacttcctgactttcttcagcctggtattgttgaatggaacaaaggctcaatcgaattagataatggctcatctattggggcatacgcttcgagtcctgatgccgttcgtggtaactcatttgcaatgatttacattgacgaatgtgcgtttattccaaacttcatcgatgcatggcttgctattcaacctgttatttcatcaggtcgtcgttctaaaattattatcacgactacaccaagtggattaaaccacttttatgatatttggactgcggcggttgaaggtaaatccggctttactccttatactgcaatttggaactcagtaaaagaacgcctatataacgacgaagatatgtttgatgatgggtggcaatggtcacttcaaactatcagtgcttcttctcttgaacagttcaagcaagagcactgcgctgaattccatggcacatctggtactctcatttccggtatgaaacttgccaatatggattggattgaagttactcctgactcgcatgggttttataaatttaaagaagcggaagcagaccacaaatatattgcaactcttgactctgctgaaggacgcggtcaggattaccatgcactaaatattattgacgtgactacatctgaatgggaacaagttggagtattacattctaatacaatttctcacttaatcctcccggatatagttattaaatatctaatggagtacaacgaagctccgatctatatagaactcaactctaccggcgtttctgtagcgaagagtctttatatggatttagaatatgagaatgtcatttgtgattcaatagttgacttaggaatgaagcagacgaaaaggtcaaaggccgtcggatgttctgcactaaaagaccttattgaaaaagataaactcattattcatcatcgtgctactgttcaagaatttcgtactttctctgagaaaggagtgtcatgggcagcagaagatggatatcatgacgatttaattatgtcactcgtaattttcgcatggttaacaacacagcaaaaatttgctgatttcgtggataaagatgaaatgcgattagcatctgaagtttttaaacgcgaattagaagatatgaacgacgattacgctcctgtagtgttcgttgacgccgtgaatagcgcagaatatgcgcctcaagaacatggtctttcatttgtataaataataaaaagcaaacaacattgaggatatatcatgcctttagtctctcctggaattgagctcaaagaaacgagcgtacagagcacggtagtacttaacgctacaggtcgtgccgcaattgtcgggaagttccaatggggtcctgcatatcaagttactcaaatcactaatgaagttgaactggttgatatgtttggcggccctaataaccaaactgctgattactttatgtcagcaatgaactttctgcaatatggtaatgatctacgcaccgtccgtgtagttaaccgtgaagctgctaaaaacgcatctccattggttgataatattgaatggactatcactactgctggtagtaactatgaagttggtgataaaattacggttaaatatgcagaccaaactgtagatgacaccggttcagttactgcggtagatagtgacggaaaaattaagtcggtgttcattccgacatcgaagattattgcatatgcaaaaagcattaatcattacccagatttagggtcttcgtggacaactaccattacttcacagagttctggtgtttccgctgtcattactttaggtaaaattatttctgagtctacagttttactgactgagcatgaaactgcccatgaagaaatgacaaaaaccgaattccagactgctcttgctaagtataaaatgcctggaattgtagctgcgtatcctggcgagctcggaaatcagttagaaattgaaatcgtatcaaaagctgcatttgataaaggtgaacagctgacgatttatccggctggtggaaaacgcgcttcgactgcaaaagctgtatttggatatggtcctcagaccgatacccaatatgctatcattgttcgtagagatggcgcggtagttgaatcaacggtgttatcaacaaaccgtcaagataaagacatctacggaaataacatctttatggacgattatttctccaaaggttcttcacgttatatatttgctactgcgcaaggatggcctgaaggctttgctggcgttattcgtctgggcggtggggtttcagctaatgaatcagttacggctggcgatttaattcaaggctgggatttatttggtgaccgtgaagcactgcgggtaaaccttctgattgctggtgcttgcgctggtgaaactgatgaaatcgcaagtacagtgcaaaaacatgtgtcgtctattgcagatgaacgtcaagattgtttagcactcatttcaccaccaaggtcaacgattgtaaatattcctctgacccgtgctgttgataatttaattgattggcgtcaaggtgaaggaagctacgactctgcaaacatgaacatcaatactacgtatgcggcaattgacggcaactataaatatcagtatgataaatataacgacgtaaaccgttgggttccgttagctgctgatattgcaggcctgtgtgctcgtacagatgatgttgctcaaccttggatgtcaccggctggttatcgtcgtggtcagattctgaactgcattaaacttgcgattgaacctcgtcaagcacatcgtgaccgtatgtatcaagcaggtattaacccggtaacgggtcaaggtaccggtgatggtttcattctgtttggtgataagactgcaactactgttccaacgccgtttgaccgaattaacgttcgtcgtctgtttaacatgctgaagaacaacatcggtgattcttctaagtggcagctgttcgagttaaacgataactttacccgttcttctttccgtatggaaacaagccaatacttggcgggtattaaagctctgggtggtgtatatgacttccgagttgtatgtgataccacgaacaacactccagcagttatcgaccgcaacgagtttgtagcgagcttctatatcaaaccagccagatcgataaattatattacgcttaacttcgttgctacggcaactggcgcagattttgatgagttaatcggaccacaataaattgtacattttcgctaaatcctgatataattgcacatatgaaatattatgtgcaattaaggaaacctaagtgattatctctaaatttgttaaagtaaaaataattcctaaaaattttaaacacttttcggaacttggatacaagctgtctcctctgggttcacctaagcatggtttcaaatactattcaattgacgcgagcgttgatcatcttgaacctgggtcaaacatatatgttgagtgtgtttgtgataaatgtggtgaacaatattcgcagcgatattgcagagacaccgacgtgtgctatgattgtcgtagtggaaaatttaagttaggaaataccattggaacagctaacaaaggtaaattgttgtctttaatgacaggagaaaatcatcctcgctggaatccaaataagacagaatataatgaatatgctagtaaagttagaagagaaacttataagcataaaccaatttattctacatgggaaaattttgataagattggactgtgtggaatacctggagcgtatcagttagaccataaagtttctgtcgcgtatggattttacaacaaagttcctcctgaaattataggaagcattgacaatttagagataatcacttgggaagaaaatcggtcaaaatcaaaaaaatctagtattgatttatgggatctattgaaatgaaccccaggacattctggggtcatctaatctttagatgataaattatattaccgcacactttaatagcctctacgatgatgtagtcaatcgagaggctatataaatatctataggaaacaacgatggaattaacagacatcactcgtgcgtttgaatctggtgactttgcgcgtcctaacctgtttgaggtagaaattccttatctgggtcgtaacttcagtttcaaatgtaaagcagcaccgatgccggcaggtatcgtagaaaaagttccagtcgggtacatgaaccgtaagattaacgtcgctggtgaccgtacttatgacgactggactgttaccatctataacgatgataaacacgaagtacgtaaggcaattattgcttggcaagctcaggcccacgcccaaggcaatgatatctctggtatgactccagctgattacaaaaaggttgctacggtacgccagtttagtcgtgatggcaaaactatcacaaatgaacacaccattactggtctgtggccaactaacgttggtgaagtacagatggactgggacagtaacaatgaggtagaaacgttcgaaactacctttgctattgactggtgggaataatgctatggggcttcggccccgtatcgaagttctgtgagttatttgcttaaatatctgacaaaacttcgatataaatatacttatagataatttcggagactccaatggcctttcatattttggacttattcgctccgtgggaaaaacgcgacgaagctgaatataagcaacaaatcaacaatgacctagagtcaatcactgctccaaaatttgatgatggagctcgtgaagttgaatcaaacgaaaacgaaatccagtataattcattcaaccaaatgatgtttggttccaatgaacctggaatgaaaacaaccgctgatttaatcaacacttatcgtagtttaatgaataactacgaagttgacaatgctgttgaagaaatagtttctgacgcagttgtatacgaagacggtcatccagtagtttctcttgatttagattctaccgacttcagtcaagcaattaaagaccgcattcttgaagaatttaatacagttttaacatgccttaatttcgagagaaagggcgctgaccatttccgccgttggtatgttgactcaagaatattcttccataaaatcgtcaacaccaagaaaatgaaagacggaattcaggaactgagacgtcttgacccgcgcaacttacaattcattcgcgaaatcgttactgctgatgacgctggtactaaaatcgttaaggggtacaaagagtatttcatttacgatactggcaaagaaagttattacgcagatggtagattatattccgccggaacgaaaattaaaattccacgcgatgctatagtatatgcacattctgggctagttgattgctcaggtcaaaacatcattggttatttacaccgagccgttaaacctgccaaccagttaaagctattagaagatgcgttggtaatttatcgtattactcgtgctcctgaccgtcgtgtgttttacatcgacactggtaatatgccttctcgtaaagcggcagcacacatgcagcatattatgaacacgatgaaaaatcgcgttgtatatgatgcatcaaccggtaagattaaaaatcagcaacataatatgtcaatgacagaagactattggttgcagcgtagagatggtaaagcagttactgaagtagatactcttcctggtatgtccggtatgagtgatatggatgatgtccgttactttagaacagcattatacatggcattgcgagttcctctttcacgcatgccggatgcaaataatcaaggcggtgtgcagtttgatgctggcacaacaattactcgtgatgagcttgattttgctaaatttattcgtagattacagcataaatttgaagagattatgcttgatccacttcgcactaatctaattcttaaaaaagttttgtctaaagatgagtgggaagacgaaataaataatattaagattgtgttccataaagactcatatttcaccgagttgaaagatgctgaagttatggagcgtagaatcaatatgctcacaatggctgagccgtttatcggcaagtatatttctcataagacagcaatgaaagatttccttcagatgtctgatgaagaaattgaacaagaagccaagcaaattgaattagagtctaaagaggctcgcttccaagaccaagaaaatgaagaggatttctaatggaaaattatatttccgcaattgaatccagagacctcgtagcagccaaaaaagcttttggtgcaattatggctgaacggacatctggtttaattgaagagcgcaaaaaatttatcgcagcgtctgtcatgattgagggtgaagagcccgttgacgatgaagatgaagacgacgaagatgaagataagtctgagaaagacgacgacgaagaggacgagtaatgcttatactgcctgaaaatcatgaattagttatcgacgctgtcgaagcttttcttcctgaagcacaggcacgttttgataagttgtccgcagcgctttctaaagatgatataaataaaattgtagagaacatggttacttctgagcctgatttagcaattgctttaggttcaattaacgaatctctacaattaaatgaatttatcgttaagcacgttgattctaaaggtactattacccgtaccaaagatcgtaaaacacgtgagcgtaacgcgtttcaaacaaccggactttctaaagctaaacgccgccaaatcgcgcgtaaagcagtaaaatcaaaacgtgctaatccatcggctcaaattcgtggattacgtaaacgtaagaaagcacttaaacgccgtcaggctctggggctaagttaatggaaaacctcaatgaacaacttttaattgagcattggggtcaaccgggcgatgtaattgatggtaaacccatgctggaatctattatcgttgaaggcgaaaatgaatctggcttaaaacctggtctgtatatcgaaggtgtttttatgcaggcagaagtagtaaaccgtaataaacgtctttatccaaaacgcattcttgagactgcggtaagtcgttatattaaggagcaggttgctactcgtcaggctctaggagaattaaaccatccacctcgtgcaaatgttgacccaatgcaagccgcaatcattattgaagatatgtggtggaaaggcaacgatgtttatgggcgtgcaagaatcatcgaaggagaccacggtccaggtgataaattagccgctaacatccgtgctggttggattcctggtgtatcaagccgcgggctcggttctttaaaagactcaggaaaaggatataacatcgtacaagaaggctttcgcctgactgttggtgtagacgcagtttggggtcctagtgctccggatgcatgggtacaaccgaaacaaatttcggaaaatacctcggcacaagttgccaatagtgctgatgatgcttttatggctctcgcagagaagttaaaagcgttataaataattatgtaacttaacacaggacatcaaaaatgcttaaagaacttttaatgaccgaagctaaaactatcgatgcttccgtcgctcttgacagtattttcgaatcagttcagctttctccggaagctaaagctaacttcagcactgtattcgaagcaacagtcaaaaaacacgccgtagctctggcagaatctcacattgaaaagattgctgagaaagcagaagaaaaagttgaagaagaaaaagaaaaagctaaagaagaagctcgcgaagagctgaaagaagctgcttctaaatactttgaccatatcgctgccgaatggatggcggaaaatcagctggcggttgaccgcggtattaaggctgaactgtttgaatccatgtttagcggtatgaaagaactgtttgttgagcacaatgttgtaattcctgaagaatcagtagacgtagtcgctgaaatggaagaagaacttgctgagcaaaaagaagaaactgctcgtttatttgaagaagtttctaagcgtgatgcttatatcaattacgcccaacgcgagtatgctattcaagaagcaacccgtgaattgactgatactcaaaaagagaaagtagtttctctgacagagggtatggattattctgactcgttttcaactaagctgaaagctattgttgaaatggtgcagggttctgtagagcagtctgtaacggaatctgccgatataaatactatcgacaaagaagcagacggtttaaacttcacaactgaagcagtcgaagaaactcctgcgactaaaaccccatccgttatggatgcttatgtagcccaagcggctcgtctttcttaatttaaaaggttatacaacacatgaaaaagaataaacttatcgaaaaatggcagccgctgcttgagaacgaagctctgccggaaattgttggcgctagcaaaaaagctctgatcgctaagatttttgaaaaccaggaagctgatattaatcaggctccggaataccgcgatgaaaaaatcgctgaagcatttggttctttcctgtctgaagcagaaattggcggtgaccatggttatgatgcacagaacatcgcagctggtcagacctctggtgctgtaacccagattggaccggcagttatgggtatggttcgtcgtgctatccctaacctgattgctttcgatatctgtggtgtacagccgatgtctaacccaaccggtcaggtattcgctctccgcgctgtttacggcaaagaccctctggctgctggtgctaaagaagctttccatccgatgtacgctccggatgcaatgttctctggtcagggtgcaaccgagaaatttgaagcagttaaagctggtgctgctctgactgttggtgatatcgttgttcacgatttcgcacagaccggtcgtgctcatctgcaggttgttgaagatttcactgtagacgctggtgctaccgatgctgctaaactggacgctgcagttactgctgctctggaagctggtaaagttgtagaaatcgccgaaggtatggctacctctgttgctgaactgcaagaagcctttaacggttcgaaagataacccgtggaatgaaatgggcttccgtatcgataaacaaactatcgaagcgaaatctcgtcagctgaaagcacagtattccatcgaactggctcaggacctccgtgctgttcatggcatggacgctgatgctgaactgagttcaatcctggctaccgaaattatgctggaaatcaaccgtgaagttgttgattggattaactactccgctcaggttggtaaatctggtatgacccagactgttggttctaaagccggtgtattcgacttccaagacccgattgatatccgcggtgctcgttgggcaggtgaaagctttaaagctctgctgttccagattgacaaagaatccgctgaaatcgctcgtcagaccggtcgcggtgaaggtaacttcattatcgcttcccgtaacgtagttaacgtactggcagctgttgataccaacgtatctccggcagcacagggtctgggtcgtggttataataccgacaccactaaagcagtatttgctggtgttctgggtggtcgctaccgtgtatacatcgaccagtatgctcgtcaggattacttcaccatcggttataaaggtgctaacgaaatggatgctggtatctactatgctccgtatgttgcactgaccccgctgcgtggttccgatccgaagaacttccaaccggtcatggggttcaaaacccgttacggtatcggtattaacccgttcgccgattctgctgctcaacagccgaaaggtcgtattacctctggtatgccttctatcgtcaactctgttggtaagaatgcttacttccgtcgtgtatgggttaaaggtatctaataccaataagggagccttcgggctccctttagttgttttaatggatataaataaacttataaatccacagaggaaagcgcaatggctaaaatcaacgaacttctgcgcgagtcaactacaacgagtagcaacttaattggtcgccctaatctcgttgcattaacgcgcgcaaccactaaattaatctataccgatcttgttgctatacagcgtactaaacagcctgtagcagcactgtatggtattaaatatcttaaccctaatggtgacctgacgtttaatacgggtgcaacttatgcaggtcaaatcggggcgacggaacgtgagtcaattgaagaactcactatgtcaaataaagactcattcagtaaagacgatatgttcaaatatcagaatgtggtctttaaagtacttaaagatgccccgtttaccgatacagcagaaaccgacgaatttggaattgtatctgaagcagtagcagctaataatattcgtatgctgtcagatgctgcagtcactgaaaaatttgaaggacccgattcagacccaatcaccgaagccagttttaaaattgataaatggcagacccaggttaaatcacgtaagcttaaaacggatttaacggtagaattagctcaagacttagaagctaacgggttcgatgctccagagcttattgatgatttacttgctactgaaatggcagaagacattaataaagacatcctgcaatcattgattacggtttcttctcggtttaaagtagctggtgtatccgataaaggtgtattagatttaactaagcaggattctgctccggaacaaggtcgtactctgtatcgtttcatttgtgaaatgaattcagcagttcaacgtaatacttcttattctggtacttatgcagtagcatctactcgttgtgctgcggtgctggcagcttccggttggttaatgcagaagaatgatggcactattccggacaacgcgtacggtatgctgaataacggcttacctctttattgtgatactaccagcccagttgattacgttattgttggtgttaaagcagaatttggtgggaaggaaactgtaggttcattattctatgcgccatataccgaaggcttggatttagacgaccctgagcatgttggtgcatttaaagttattgttgacccagctagcttgcagccttctgttgctttactggtacgatatgcgctgtcagttaacccatatactgtaggattggacgaggacgaagctcgtgtgattaatgctgcggatatggataagatggcaggaagaagtaagatgtctgttatgcttggtgttaagttacctaagcttattacggactaatttatgggagccttcgggctccctttttgctataaactaaatatgtcaaacctcggggagtattcctcctcgagggatttaaacactttcttatcatatagattaacacattctatcccgtgcctgcgagctatatcaacagctactctcgtccctccagatacactcccgcatcttttctcaggcgcccaatataataccttatctacaggctcagtgcattctaggcccaatacctgcatagaattccgtgcgaataatgtctgcactatcttcgagcattcatcccagtacgacgtaacttctctcgccttaatgatgcttttgattttggcttcgtttgataattcagaccatacaacaacacctgtaccaggaacatggccacaaaagccagaataaggaataatcctacaagaatttgacctatcgtatttcgccaaccacgcttcatctgaacccggagctccacctgaatatgaaaaatgcccctcttccgagaggcgttgacctattgtagtcattagactcagaactctgcgtggcgcttctcgtgaaccaataagcgccaatctcattattctaaaacctcatgccatttgctacgaatagtgttttgaattaaagtagtgatttctttcttaacaacagaagggttatcagcgaataacatatcatgaccttcacgcgctgcttcgttaatgatatctttcatagtcagacccataacacgaccgaaatctttagcagttacagtaccaatatgagacagaacgttacttacccggttccaggttacatattcggaaaagatttccagaacacgcttatcattctcggtgagttcaaccttcgctttaataggcttatcggatttagccttctcactgaacttagagttcttacacttaatagcaacacgagtaccattattgaaaaacttaggatgaactggcttaagaacatagccttcagctacgccagtttcagaagaagcctgcggaccgaacacatgtttatttgcatgttcaaggtcagtcgtgtcaacaagctcattatagtaattgacaatagatttaaagtcattcacatactgagatagctcggcaaatgaacctcgaccaagaagtggagctaatttaagaccaagaccagtagcaaacgattctactacataatcgtcccaataaactttttcgttaccggaatccgacaggatatcaaatacgtagaaatctttctcaccatagtctacgcctttctgaataccgccaccggcaaattcgccgaagatttgaacagatactaaatccatggcgttcagcatattctgcattttagcgaaagaattcttgtacttcttcatgataatctcatgaccaaagaagctttcaccttctaaaataggaccagtacgcttagccggaacaatttcggtaggggtaataatcacactgaagttagtgccatgaatcttctcacgagccacccactcaacggtatgcatatcaaaaccagcaccgcgaatcttctcgatgaacttaccgttgtaatgattctcgagactagaatatttctcaaacattataatttccttagaatgtgattttcataaagtcagtatcaccgttacgctgggaactggtataatttgtaacaaatccttcatcatgcaaataattaagaacacttgtaatatgtttcttaactaaactgctaggatacataattaactcacgttgacccgctaaagcggttttctcaatctgggttaatacttcttcttttgctgcactcaattcttctgtagcaatattgatggctgtattagccattctatcggcaaggttcataatttttctctcaataaataatataaaaccaggagtctatcttggtcaaaatggtatcagaggatttcccctgagcccattataccacatcgatttttaaagcaattaataaccgctcggcacgaagcgatacatgatatatccgcttttagttagcatgatttcaaattgacttttgcttccaacctcaagtactaatggaatatctttatccatcagcatccaatcaatttttccataccgttcattaatcaaatccgttattttacgtgcaccacttttatagtagtaagaactctgaacagccatcattttactaacaaatttagatgcaaacaaccagacatttaccccattagcagctggcgtaaatttcttagaaagcatttcttcaaatcgttctactacaattgggtctactttaggcattttcataataacctcatgtgtttaacaagtttcttatgacgagattttataccaacgtttgttaagcgtttccgataaacgactttttctttttgcttaaacagttcgtgtgctttctcaactgagacccataatttagcagcttctgctggagtgatatctaacgcccttgcaatttcttgaaaatcttttccgctttcatgcatcaagtgagcttgtaatgctttcataataacctcatctatgtgacgaggacataataaaccaatccgtgaatagcaaaaaaagggagcccgaaggctcccgaatattacggatagataatacctgcttccagcgcagtacgatgaacgatgtatccatttctagattcttgtacatcgacttctggataatcatctagcattttagctagagtataccgatgcaggtaataatcactgtcagggtcgtcgagtttccaatctttgccctcaacagtcattcgctggatttcatccattacccaccatccacaccagatataggctgttccacggaacggtagaggatgaatatatggaagttctccgtctggctcaggggctactcttttagtaaaaacaacagcaatgcctttagttgcagttccattattatagtctggagcagaaaccgttacttcacaattaagtgtgtagctagtttccgccgattcagttaaggtaattgttttacctgtttgaccggaaataacagcagaaccacgtttccaaacataagcaatgcttgctcctgctggcgccccagcaacgttagctgtaactacttgggattggccaatttctttagaaacagaagttgggctcaaagttaaagtaatcgcaggcatggttttgttcttaactgtcagagtagtttctgctgaagctgtttcaggggagccactagctggagtaacagtagcaactactttaatagtcttactgcctgcaggacccgcagcaacataattcatggctgcggtaacagaagattgttttacgccgtttactgtccacacaaatgattctgtgcctgcagccgcggctccagaagttgttgcagtaaaattggttgttgctccaatgactgccgaagcagccaaaggagcaatagatacgctataagccataggtgttccttattttaaagttacaaatgaagaattacgtgtttcacgaatcataacagacccgtttcttttgatgtaatagattaaactaaacagtgtctggtgtgctgatgggtgttcaaacgacgttggccgagatttccagtccgggttatctttaatccattggtaaatccaccatggaagagtaatatatcctgggttcttacctagcaattgcatgtttggactaaagtttttaggaagctcaatggtttcatcagttttaacaattttaactactttgtccattgctttggagaattcttcagggtccgtagtactaattggaatgtttgtaagttttccttcatcatcgatatggataatgctatctccaataggagcttcagcataaaatcctttatcattgatagaaggagtttttacttcaaatccagggtcatttactttaggtgtttctttataaaaatctgggtcaatatcatgaattttaataccagcattaactggagcgtcaaacagtagttttgcttcatcagacgcttcatctttaaatactgctttaccctcaatttcatcatctgcttggattaaatcagcaattgacagcccatcgttgtcttctggcataggctcatcggccaatttagccagttctttttccaaatcagcaaccatattgtcaaatgagcgggtcttcttcagtttaataccgaaggttttggcatattcgtcgagcttgtctttagcttcttttttatcgagtgcctgaatttctttgatatagtctttatctagcattgggtgtgcctcatgtaatgtataaatatgattgtatttataaactgaggatagtacagtgcacgacatccaagtcaaatttaaagattttagtcatgttcatattgagtgtgatgactcaattttctatgaactcagagactattttagcttcgaagccgatggatacagattcaacccgaaatatcgctatggacattgggatggacgaattcgtctgctagattataatcgtctcttaccgtttggtcttgttggccaaattagaaaattcgctgaccaattcggatataaagtttatttcgatccaactatattcgagcaagaaactctttcacgggaggattttgacaattggttatcgactaaagaaatctattcaggattaactaagattgaaccccattggtatcagaaagatgctgtatatgaaggactagttaataggcgtagaattcttaatcttccaacgtctgccggtaagtctcttattcaggcattacttgctcgttattatgtagaaaattacgaaggcaaaattcttatcatcgttcctactacagcgttagttgaccagatgattgatgatttttgtgattatcgtttatttcctcgcaatgctatgctgggtattcgaggtggtactgctcgtgattcgaatgcattagtttatgtatctacctggcagaccgctgttaagcagcctaaagaatggttttctcaattcggcatgatgatgaatgatgaatgccatcttgcaacgggtaagtcaatttcaacaatcattgcgggtctcaccaattgcatgtttaagtacggactgtctggttctcttaaagacggcaaagctaatatcatgcaatatgttggcatgtttggtgaaatcttccgtccggtatcaacttctaagttaatggaagacggacaagtaactgagcttaaaattaatacaatcttcttaagatatccagatgcagccgcaaatgctttaaaaggaaaaacgtatcaagaagaaattaaattcatcaccaatgttaagaaaagaaaccgttgggttgctaatctagctgctaagctagcatcgcgtgatgaaaacgcttttgtgatgtttaaacatgtagctcacggtaaagagctattcgagatgattaaagctactggtcatgagcaagtttattacgtatcaggtgaagttaatactgaaacacgtaatgctttaaaggctatggcagaaaacggaaagggaattattatcgtcgcaagttacggtgtattctctacaggtatttctgtaaaaaacctgcatcatgtaattttagctcatcccgttaaatcgaagattatcgttctccaaacaattggtcgtgttcttcgtaaacacaaagataaatctttagctactgtctgggatatcatcgacgacctgggtgtaaagccgaagtcagctaatgctaaaaagaaatacacacatttaaactattgcttaaaacatgcattagagcgtattcaacgatatgctgatgaaaaatttaactacgtaatgaaaacggtaaatctatgattaaatttgaagatatttatgaagccacaattcgtgaggctactatcgataacttcatgagtaaaattaatgcttgccagaccttagatggtctggaagaactcgagaagtattacgataagcgctctaaagaaactactcttgctgattctgatgacatcattgtgcgggatgctttggcggggcgtagacaggctcttgaagccgattctgaagatgaagatgacgaagacttctaatacaaaaaagccccaaccgaaaggaaggggcaaagccaattggctacatcaacactagactaaattaaaagctgcgtttcttgtaattgctcttctgtgtcttcagtgacaggcaattcaatcgcataattatagcaagctccgggatgaaccgggcctttgtctgtgtggacaaccaatgcttcatcgattggtcctttacagacgacacataccgtattcgacatgattgtctccttagtttacaggtttatttattacgcgccagcttcaaactgacgaaggtcaataatgtgcttaatgctaaaacctcgtgacttgatagcatccattgcatcactacagaactccaaaagaattccccaatattgcaatttagtatctacacccaagatttctttatcagcgcttaaaacagttttcatttctgatttttcgtatacatccatgcatacttcaccaccaacctcgccacggccagtgtaataatccaatcgtgctttaagattttgctttttgagggcatctaatcttaacatctcttttcgacaagtcgagtgcttacgcacccatttaccatacagaacggggttattagccgcttcatactgtagtttagtctggtcgataatcaaatcattatccaattcatcctgtaattcttctaatctcattctatctccactctactgtttcttgggaaggactagtcccattatactctactgctagagttagcattactacgcatctgtatgcgtatacgttctagcgtatcagggtcgtctactatagaaaactgcacggtgacaattatagcgttatcgtcatataacggaagcacatcaaccgatagacgattaatcctaggctcataattacgcacggcagagactatattacgctttatcgtatcaccagttaacggagtcatgttttcaaataattcgtttgtgatatcacaaccaaactctgggtcaaatggccgagacccctttcttgtggttattattccaagaaggctatttttaactgatcgagctcctactgtttttgacacatcggtatcccaagcaagtcgcatctctgggtcaaggtcagaatatagtttatcaatattgctcatgacataatcttaaagaattctttaagccccttaattacatgaatgtgagaaattccgcattcacaagtaatgggaactgccaattgaacctgtggcttcaatagcatatttttgatgttaactacatcttcggttgtaatagcagaatataaatcatcgatttctgcatcgtttaaatcattaaagtaaatctgctcatttccaaccacgatataatctatgcattttgatatcatcattggaatgtcggaatcgtcaaaaagattaggatacttaaactttatcttgaatccctttaagtcataccagaggtcttctggaggatcgatttgcgcatgtgtataatttaatggcacaggaattttacgcccacaggtgcaattccaggtcacctcatgattaacctcgcctatactgtgcgcccaaagtataactataagtaattccgattcttgtttgtttaacccagtagcattggtgcattctctgagcaatgctttaacgcattcatcgattgtaccgtttttcttcgctgcaattaaattagcgtattcttctagtgtaaaagctcggcactggatattcttgccatttattcttgtttcaaatttatatgtgatgttcatatccactcctcttattcaattatttataaatagtataaagaggattaccttatggccaacatagttagatgcgaattaccagatggtgtccaacgttttaagccatttaccgtagaagattatagagaccttttattggttagaaacgacatgaacactaagtctgaagaagaccaaaaacaacttatagcagaattaatggatgattattttcatgaccatcctgtcgagtatcgtccttatatatttcttaaagtatttttgtcaagtattggtaaaactaaaataccagtcagaatgaagtgcccaaaatgcggaaaatacaagcagtatctttttaatcttaatcagcctccgttgacaaatccgaaagtagaggttgcaggattaacgcttaagttcaaaaaacctatagaaataattgatgatacaggtaaaatgattttagacaacattatatctgtgaaggattcatctggggaataccagtggaatgaattaagcgatagtaataaattgacagttatcgatgctatagatgttgaaaccttggaaaagattttatcgcagatgaagccgtttaactttgagctaaagacgtcatgctgtgataccacgacagtattaaaatatgataacattgttgatatctttaagctattgctacatcctgacgagattttcacattttatcagattaaccatagattggtttctcagggtaaatacgatttgaattctataatgaaaatgctgcctatagaacgtggcataaccttatcgcttattgaaaaggaccttaaatcatgacagcgcaaagattaggatatcctaatataagcataaaattatattctggatatgatgcgtggttagctaatagattcgttgaattagcagctacatttattacattaacaatgagagattcattacgcgggactaatgagggtctgcttcagttttatgactcgaaaaatatgcacacgcgcatgaacggtgatgagttagttcaaatatctgttgcaaacagtaacacatcaagaacacaaactcgaatttacggaattaaacactttacagtaggtgttgatgataaaggtgataacattatcacccttcagcttggaacgctgcatgacataatgaatctcaagttcagtagagcgttttttagttctgcgtatgaaactataaaggaaatgataggcgcgatgtatgttgaccaaccattgattgctcctcctatcaacggaattaacgcttacgtcccacgggttccctggactagtactctcaaagattacttacgatatgttagaaatgtaggcatttctacagacaacgatcaatttatttttgcctgggaagatatcactgggattaacatgatggattatgaatcaatgatatcccaggacccaaatgtattcatgttcggggctcctcaaacaataggtcagtttgctgcaggattaaaatatccattggcatgggattttgaatggcttgttaagtcaaatagatataatagaaatcccatgaaaaacgcaacattttatgcacactcattcgtggacaaagatgttacccgaattattaatggagaaggccaaaacagcgtattcattaataggtcaggcggatattctgacatgatttttagaaatggctatgaagaagcattgcgcatttctacgatggctcaatacgacgggtatgctcaaactaaatgttacggtaattttgaactaactcctggtatgaaaatcaattttgttgatttaaaggaccagttcagaactgacttttatatagatgaagttatccatgaaatatcaaataacacatctataactaacttatatatgttcacaaacggctctgcccttgaacctgtagatttgattaaggtgaaaaatgaacttaaacgtgattcttcctattaagaaaatagtaataaatgaaaagacgatatcaattccaaaactggggttaaagcaccataatctgatgaaagatgttaagggtccagatgaaaacatgaatcttcttttggattcaatttgtccaggattaacagcagccgaatctgatattgttgtattacatttattagcatttaacaacagaataaaagaaactgttgttaaagatgattttacctacgatttgaataaggtttacatttgccagcgattaactcaacggttagatggtaaagaattcaaattcagagctcctcctcgttattccaaattaggttcagtagattcaattttgagcgaatttcttgaatcagtagatggaaaaccaatggatataaactttatgaagcttccagcttttgtgacaaagtgggctgatgacttagtaaacactatagccattgatggacctgaaggaccaatcaaaggcatgcttaacgtaatggaaatatttgaatgactaagaaatcagaaatgaattcaatgcgtagaagagttattgctgattcggctccacagaaaagggctgagtctcaagctgatgctcagattaatacgctagaagatattggtcgtcgcttagacgaccagcaagcgtctactgatttgatttcggatgtaatagaaactaaatcaaacgaaattatcaaatcagtagaagatgtttcagctggtgttgaattaactgccgaagcttcagaacgcacaacagatgctgtctcgaaattaaatgatactgcatcgttaattaatgataagctcacgaaacttgccgacttgttatctaaaaagcatgatgttcaacaagatgtccaaaaaactggtactggaacatcattagaaacgataacagaacaagtcccggatgctcctactcagcagccattggaggaattacttgaaagacttattcctcctcaggatgacagacgtcctgacgcggatttctttcctagcacagaagagcaagaggaaaaagctgagcctaaaaaggaaactgaggacaagaataaaaagtttcttgacctaaaatttggagaattaattaaaatcgttaaatctggttttggaaaaactatttcattaacagataaaattagcagtatgctgtttagttatactgttagcgctttggcccaaatggcgaaaactgccgccatggttttgggtgtgataatgcttatagatttaattaaagttcattttaattattggactaaactgttcgaaaagaactttgttgaatttaacaagcaagccaaagaatggggtccgctattaactgcaataagcgagatgtcgaatgaaatagtaaaatcgttcgtcaaaggagattggggtggattagcaaaagccattggctcgggtttggttgatgtaattgataagctcggagaaaccattatgctcggaatgagtaagcttcttgctggaatgttacgcgcattaggattcaatgattcggccgataacattgaaggcgctgctttagacagatttcaaactgttactggggcagaactcgatgaagaagatgctaaaatgagagcaaaatatgttgaccgtcaagaaagagaatatgacgaacaacctgaatggaaaagaaagctttctgctaagttccaaaaattcaccggtcagattgatgacgatgaatataacaaactgctgagcggagagaaaaagcagtcagcgtatgcagacttgccagaagacgaacgcctcaaaatcatcacagctcgtaataatgctgaggcagaactcaagcgtacaaaagcatatgttgaaaaaactgacgcatctgattccactcgattagactctgctaaggatgcagtacaaagcacaaccactagatataaagaactagagaagttatccccagaggttgcaaaagatttaaaggttgaattagaccaattgcaaaagcttcttgattctaaaatatcagaacctgctccaactgccgaagctatacctgcagcagaacaacctgaggttaaacagtctgcttctattaaagccgccgcggatagtcgtgaagctgctcgtacacgtgaatctaatacacagtcacaacctatccaggttaatactgctgtaaataagaatagcacatacgtttatagaacgcctccacagacttcaacagctgctcctggaatgcaaggcgctatgaaaacctcttaaggaaaaacaatgatttttgaagaactggccgatggccttgaaaacatcaaaaaatcaggaactcgaatttcccaaggtaaatctaaactgacgaatgcgccaaccactaaggtggcgcagttcccagctgaacgttcagctgggaatgattccgcccaagatatgagagtacatgacttatatcgtaacggattattattcacagcatatgattttaaaggaagaaccactcctgatttgcgttcatttagacgagatgtaatgttatcgtctgtattcgattcaccaatgtcagcattggctaattcatcaagctctaccactagtactgcaccagtagctaatattctattaccgcggtctaagtcagacgttgattcagttagccataaatttaatgatgttggggattctcttgttacgcgcggcggcggtactgctactggcgtattaagcaacgtggcttctactgcggtgtttgggtcgatagagtctttaacgcagggattaatggccgataatggtgaacaaatttataacactgcccgtagtatgtatgccgggcctgataatagaacgaaagtgtttacttgggatttaactcctaggtctgcagatgaccttatacaaattattcgcatctatgaaatttttaactactattcttacggtgtgactggaaattcatcatacgcgaaagaagttaaagctgctattgatgaatggtataaaggaactcttaaatccgcagctccagatggggctaaagtagaaaacacagtgtttgagcaaataacatcgtttttaagtaatgttattgtagtttctaacccaactatttggactgttcgtaattttggatattctacatcaatggatggtagagaggatatatttggtccatgccaaattcagagtatccgttttgataaaacgccgaacggacatttcaatggtttagcaattgctcctaaccttccaagcacatttacgcttgaaattactatgcgcgaaatacttactcttaatagaggaaacgtttatatcggaggtattgaataatgtttactctcgaagaatttaagagtcaagctgctgatatcgatttccagagaactaacatgttctctgttgtattcgctactgtaccctctagtaaaacccaggctcttctaaacgactttggtggagagctgtataataatatgggtttagatggaaattggcttggattgacaccaggtgaattcaatcagggtataacaactatagtgacacaaggaactcggcaagttgttcgtaaatcaggtgtgaatacatttatgattggcgcaatgactcaacgtgtggtgcagtcattattaggagaatttacggtaggtacttatctgctcgatttctttaatatggcatttccaacagcaggattgatggtttattctgctaaaataccagagaatagattatcatatgaaatggataagttccataacgctcctaatataaaaatcacaggaagagatatggaaccgctggttctttcatttaggatggacccagaagcaagcaactaccgggcaatgcaagattgggtaaatgctgttgaagacccagtgactggtctgcgaggattgccacaagacgtagaatgtgatatccaagttaaccttcatgctagaaatggattacctcatactgtatgcttgttctcaggggctatgcctgtagcgtgtggagctcccgaatttacatatgatggagaaaacacgatagcagtgtttgatgtcacgtttgcttaccgtagcatgcaaaccggttcggttggaaaacaagccgctatggattggttggaagataaggctattcagaaaattgagacgattaatccaaatcagggcttgagtgcgtctgcttcaagattgtctcgtttaggtggggctggtggtggaatttctaatatcactactacgacaagtagaataatttaggggccttacggcccctttgttttatgcaatgcagccaataaaccctggctcagtacgaagaagtttcatttcgtttgtggtccaaactactttgaccggaataataccttctgctttaccgtttagaaccgcttcaacaaacgatggttcagttggcttacggaagatatcttgaataagaactgtaggagtaccttcgttaaacccttcaagcatgataagaacttcttcattgaacttctctgcatctttaacatcagcagaccattcaataccgttaaagcggaatacatgtttcatatcaatttcctcattggtttgtgtaagtctatagtatcacgtccttgtgataagtaaacaactttatgcaagtttttctgggataccatccaggttgatagcaccagccagtagctccatggtacgtgtgtagctaaccttatctgtggaacggtctggcgaaaagtaaatctcatttaaaaagcctttgaacttgctttcttcaagaggttccacttttccttgttccatcaagatgtcaccatcatagagatgaacggattcatcgatttgctctggaggaactaccgtcatttctaccatgaatgtcttgttattcgctacaccaactccatttctaaaaggagttccccatactttgttgactttcattgccaacccgcgaggaagaataacttcagcctcatcactaaaacttgataagacacccgggataactaccttaactttatcagccccatgaataatgaacccaaacttaaactcatcaccataggcaacttcctcgcctctatcaactctttccaagttgtctgttccaataacagaagataccgcatcgatagttgtttctttgttttctaaatcagaactaggtgcgtctggcattaatgaatcaccagcatttgaataagcaccaaagataattggacttaacgaggtagaaacatagttctggaaataaaacattttagactcaatgttatctttaaactcttcgtattttccgcgctgaccacgatacaaaagagtgcccggttcaagacgcaaacctttttcaaaggcagaatcgagcggacgaattttcttgtcaataatcggatcgcctaagctttccataccaataagatagttattaacaaatgaataaccagaaccacagtaatgatgtattgcatctctttcttcttcgcttaaacgagattgcatttcacggttatattcaattgctttggatatagaatcgccaacaattgacacataagcggatatcatataattgacaagattttggtattgacgtaaagctccgaaatcgtcagctggaggcatatcaaatccacgagtagctacttcaacgattttacgcattgtttccatagatgcaggatttttagcttgagcaataacgtcagcaacgtctgaaattcgttgttcagtgattttcattttgtctgaacctgaaggaatgaaaaccttccagtcgtcatgcattctcgacatttggcctacaaataatctctcaactgcatcgccaaaattacttccatatccgccacgaacacgatagtgcttgatatcatcaacataaaaaggaattgatttttctaatccggctttgatatctttttggaggtctaccgtatcgccttctgcgtttagtactggagtgttagtagttaattcgtaccagcgttcacgtttattttctggccaatcttcatcaacatatgaaacaaatttgccgtactgtgctcggattaaatcttttcgagacactttcattttactcattacagcgagttcagatttcttgtcttctttttcgccaatggaattagccaatgcttcggacttggtaacgttttcgccggtttctttagacacataaacttcgcctactttggaatctactttggtataaagttcttctgaaatttcaggaattccttcaatctcttcaagtttcttacctttacgaaccataatagaataagcatacttacctttgtagtaagccatatctttcattagattgaaacgaccaccggtgcgagtagtaatcaaccgagcaagaatacgctggatagctttatcttgtccttgcattttctttggattaaagcggaacattactgcatcggctttaatttgtttaactactttgttgacagtttcaaaaatggtattgatagcaccaatcgggtcttggcctaaaccgcctttaagcgcaccgatgttacctttttcggatacagagaaaacatagacctggatgaatttatcacccatcttgatgttcttaactgcatcaccttgacctgacccttgtactaaccgaatcattaaattgttattacccggcaccttaatcaaaaagacctgtggtaccttaagttttggcttaacgttctcgacaggatagattttactattctcttcatcgaaaacttcatttaaaagttccatgacatatcctcgtttgtttattctatttatacgaaaaaaggcccgaaggccttaattaattattgttactgtacgccaaacttgtagtccatttacagattcatactcttcaatgttttctttgaagtttcttaatgtgttaatgttattaaactcaagaacttctgtgtgaacagaaatacccccacgtccgtcagaagatttagcaatcacttcgtataaaactttcattttattcctgttgcctcagtaaagttaacaccaaacgcggcttcgaatgtattagccacttctttatcatatctacgctgtttaatgataggtaagaataatcctactgtaccatcatcacggccttcagcagttacccaaccattgcattcaagttcccagatagttcctggaagagaatctctgtttttccatagatgagtgcgatcaagttcatgtaattcttcgggcttatctttaagacctgacccagcgttaacacgaatacgaccacattctgatacgaacattaagccgcccattttaccaggttgttttctatgctcgtacgaaccgacacatttcaaatctacagtgataacctctttaaatttaacgaggttcttagaacgcttatcttcccaataagcaccgatattcttaaggataataccttcgagaccttggtctacgtatgttttgtagatggctctagcttcatggatgttatgtacgacatggttttcaattagaataaccttgtcatagcctttgctcatcatttccaatgcacggaaacgcacatcataagcaaatccaggaactttaccttcggaatatactacatcaagtggaacataatcccaaacttggaatctcataccttctgcttcttcggcagagattgttcctttaatggccttattagccaaaccgtttgattctgtacgagccgtctgttggaattccttagccttacttagctcaggaagctcaggctctttaaacatatcaaacaggtcgttttcttcttctttcacttcgacatgatataccaactcgccatcaatcatcacaccattaggatggcgttctcgggcttctttggtcatctcgataagttggcgcttaagtttatctagacctaggtattcattaccggaacgagtaagaagagttacatcatctaattcatctccgcggatttcagcgaagcatcgggctccatcagctttaagttgtgcgaacgcagggaacttaatatacgatagcgctttctcagagtaggctgatgctaacatctgtggcatctcaggaattaatttcttccataccttattagcaatagaacctgaagctccgcaacgcatatctttaagaaggacacggaccagtacactagcatcaccctcgttcatcttagagagcaaatctactagcccctggattgccatattaccagtaagtactcgtgctgccagaatgtcttggaggtaatctagaccatctgaaaacgtctttgaaggaacatttggatatttaacgggagtatattctggaactttcttaataaaaaatttaaatcgcccggaatacgccagcagataagctcgctttaaatcaacgttatctttattgtcaatgagaatttgggttttggctttagaacccttagcatcttcaattgctttgatgatatcaaaaatcattattcacctaattcttttgaaagttcgcttacactacgatgataagttaatccatcaatataaacaaacccgttattgatgcattcattccaaatcgggcacgactttgcttcacgccaaattggattccaacgataaaactgattaacatgaccataatcacatgataaccagcgtttacccaccttagtatgaactacaaacatatttcctcctagggtatggcaattataccatacccagagtgttagcaattaatttggtgattatcacatgtaatacgaccgttattccaccagtcgtttccaggaggaacatgcgaaccaggtctaaacggaatgataggttgtttccaccaatctcctggaacttgtcgtggaggccaattaaaaagatgttgctctttacgaatttggtctttgatagcttcttcccacaatccagaaagagacttctgcggtttcttaacggatttcagagattccaggcaagttacgatttgatgccaatcttctaccaaaattccaggagcagtgacagaaccttcacgctcgccacgaggcatatagaacacacgggtttcagtgtcttcaaatactttactggccgcagcaatatgtttaggcaaatcatctacatagcagacgatgcgatcgccgtattttactttagccttttccagtaaagcatctttagattcatcataatcgcagaccatgatttctgtaaatgcatcagggaacaaagcattcagattgaaacgacgattaaggttagcatctactgagttgccaagagccgtgatagcgacaaaatcgtatttttctttgagcttattaactgtagctaaagcatcagcatacggagcaagataacgaataaaatcgctgttgttatacttcagaagcagcttaacagctagttcttcttcacaatcaaacagctcagcgggtttaatgaatttttcagtagtcatcatatcaaggatatgctctaccggaaggttatatttttgggcaaagtaaggcagaccactttgccacttaacgatgattccatcaacatcggttgcgattacaggttttgacattcggggaaattcctcaatgcttgtttaaatttggcaacgctatttgcggcaccggtgaaattgaaccagattaaccctggagtgtccgagggttctatatcaattaattctatattataatactcagcagtctttagcatttccctggtgatacgtcgggcaaccatatgaccgaaatgaggattaatagacatcgtcgttagcagcccttaattgagtaatcggataaagctcggattctgcatggattgaacgattgccatcaacccagttgacttcataccaaggctcaaccgagtaggctttaatggctggagccgtgtcacatacaactccaggaattccatttgctaatcttactgtactgaagatatgatatttcatgcatcaagtctcactgcccattcgggcaattcaaagaaatccggagcatcaatttcatactcaacggtgtgttgtttaacatcagctgacatgatatcaaccattgggtggtttttcaaactgcaagaaaaaataccagctttagatttaggcacggatacgatcattttaatttcctcaaaatttagttatgaatttttctttcggcatttttgcatttgagccatcactgtcagaatacccaattggcatagttgcattaatgaattcaattttagcatttataacattaatgctcagagaatctacgccgtcaatcatgcgaaattcagaagggcaatatttatcaatgtatgctttcacgccatttttattagcaggtgtaccatcgcgagtatcgctgataatggtttcaacttttttctttcgtgaatcatagaaagctgatacaatcatttcaatttcctcttaaaacgggcgaatattaacgtgaactacagggatagcaaaaggttgcatgattacaacttttgtgtctttagttgcattcaggcgttgtacttttgcaagattaacagcttcttcctttgttaatccaccattgtaggtatcatttcctttatttgaggtccaaacaccccaatcattgcttccatcatcggtcttcggttcaggttctttgtagacggtttcttcaaaataatgctgaaactcttgattagtaagaatacaccacatgtgagaaaagcgaacttcatctacactaacgcgtttatattccccatctggcttaatgatttcaaattcaactaatccggtattttccgcatatttaaaggttctggtaattttaatcggattattaccgatttgctcaaaaacacccttgataagagcgcctggagacaagattggagtcttttaagcttatagaatttacctttttccattatcatttcctcaatagtggggccgaagccccgagttagttaaaacttgatttcgtttgaaacgatatcccagattgcttcacgttgttcttcggttgttttacgaccgaggatgtggcgaagataaatcttaacaagcagctgacgatttgtgttccaagacggatgtgaagataaatcacgtttacgaacttcatcatggaatccaactttgatttcagaaccgttgaactgaatatccagagtaggaccattttcaaagctgaagaatacgtagttatcttcccagtacatatcgatttgagctactgtgccattgttgtgttcccaaagcaaagtagtagaaacgtcccaagcattgttctgtacgtatttgcggttgaagttagtgaagttcattttattctccgttgtccgtttgggtggtacaggtctatagtaaccttgttgaacttagaagtaaacaacttttttcattctgtggaaaataaaaaagggactcccgaaggagtccctgaacttatgctttcggcttaccaaaacgagaagcatcatcgcgaagaaccgcacgagcccgacgcatgattttctcaaccgtctgattgatacgcttgttcgacccacgcttgtagccagcgcgtttagaggtaccaacaacttcttttactgcagtttttgctttagcttgtttagccattttatcatcttccattttggagaaatacatgggagcacgttcttccgaggttcaacttctttcgacagttctttcggttgtagctcccgcaagccctcaaggggtacgtttaaactcttatctgttgcacaccgttagcttaaaggttccgggtctgatttctcagggataagatatacaccgatggatgtataggccttgaggcgtactcccgattggccatcgcctcggggtagcatgcacttgccgtttattttctagctgcactttggtagcaaatcaccgatggtttcggatgttttacgtggggataaccaacaacgtccacatcatacgttacccatgcgtacacatggtgggcgtacaaattacttcagcgttaccacaaagtggcgaacagctttgcgagcagcagaaccaagatgcttagcatacttcagttcgtccatcgcttctaaagtatcacgaaattcagcttgtgctgggttcaggtgtttaaaccctttcagaacttccagtgcttctgcatagatatcgattgaagccccgtagttttcgtgaccggaattccatgcattacgttggagttccagagctttagtaagttgtttgttcattgaatcgttcctcaaatgaggttaaaatttggtggacggtaaccgaggtttagctcgggcatccaccgcttagaattgctcgggtaactaattgtccgacgcccaattcatattattatttatatacgcatgcaagggacttataatgacaagtcacaaacttctgccgaatttctttaggtttcttcacacctgctgctactaacggatgaggtacatttctgatattaccaacaggcagtggagtcaaatcaccgacttcaacaaatcctttcggtacatcatcaccgatagaatagatttcacacatatccggcagttgtccttgttcttcttttccaagaataataccggaaggagaaacaatttcatcaccttgctgtgcaggttcagatacgagaattacatactcgcctagagctttaattggaagttccatgtgttacctttattgtttgaccatgtagttatattaacatggtcagtttaaagcaaattacttaccgatcatctgcagcagatgctcaactttcataccatttaccgagatcagtttatcaaaggtaaatgagcgccaaccttctttctcggtatcatataccggaagtgaagtagtgctttctgttcgtgcagatttagtagtactttctaccaaatcagatggaataatgtctttatcacgagtacagcgcagagtacgaatagtaccatcagctttttcaaacacaatctgggattcacccatgctcagcacagctttaagtgtttcacggatatggatgttttgttcagtagtcagtttcattttgatgtctctttaatagttttgataattacagatttgcgcttggataattcttttaataatcgaactgcttgatcttcaaatttaaatgttgctaatggtttccatttaaaccaataccggcgttctactgagtatgatataacaacatcaccacttaggttaagtttattaatttcaacaattctaagtttcattattcaattccacagaattctttaatgttataccaattcaacttatccaaattacgttttggaacattgaacacctcgattccagcagaacgaagaatatcgtcccaaccgggttcgttcttgtcgtatgtttcgcagtatactaattttttaataccagactgagcgatggcttttgcacaatctggacatggagacagtgtgacatacattgttgctccatcaatactactgccgttccgggcagcaaaaagaatagcattaagctcagcatggatttcattgactttagaccatgcagagtgggctgctcgatgttctttgagcaatccgacttttttgacttggaatccgtcttgacgcaatcctgtagatttgtaaggaatttcaccaatccaaccttgttctgctgcatggtcacaacagttcacaccaccagaaggtgaaccgttatagccagtagaaataattcgtccgttcttttcaattactgcgccgactttccacgagcagcattttgactcttgagatacgagatacgcaatttgtagtactgtcgacgctttcatttaaatcaccagataagttgtgttatttgttttaaccaattttaactcgtcggtaggagaagcaaaactctctactcgagaagtacgaatgcctgtaccatctggaaacggatgatttcctcgttcaataacatcggaaaagacataaccataaagaggttggccttccttaacatcaacgttactgtacaaaatagcatcatattcttcgcgtggaattgaccaaacgccttggtcagaaccaataacggcattaattagacgaataccatttgggctgatttctgctttaatgccacgagcatgttcaattaaaagagcttctaccgcttcacgtaaagtcattagatatgtcctaaaatgttagtcatttcaacttggcctgttccggttaaagccaattgagtatgttgattactctttccattattaactgtaatgatataagcatcgacatagttaaaggatgactctcgtcggagagtcactttacttccaggaacccggtttgctacttcctgtgcgaagattttaaccttcgcaataaattcatcatgcgaaaatttagcatcagacaacataagtcatgacctgttgggtttcaaaattagcaataattccaacgataaaccagtcgtgttcaccttcgccacaagaaattttaacttcagatgaaccgcctgagcggtcaatagaaaatttaataacttcgccgtttggaataagtgcattcatggcagataaaaactctgcatgcattttggctacttcagatggagtaaactcatctgttaaatgattagcaacaacttgcgtaaatgatacttttactacttcggaatactttggaaacattatactttcctctaaaaatcaccgtgggctacttgccagcattcaacaccaatacgacgccacatttcaactacctgcgccctgtcatctactgcaagtttgacattataacgatcagcaattcggtcccagaagatttcttcttttaccacatcgtctttgcgtgaatcgccttgcttacgttggaagtgttcgcctgtttcgccaacatggtccaacaaccatttcttcgtaatgcgttgataaacagtagggtcttctttagtaccagactctctgccggaaacagtaagaattttatatcctttgttacgaagcattttaagaaattcaattaccatttcctttggatggtctttaccgcatttggccaagtcataaggagaacggtgattgttatctgctaatgttccgtcaaggtcaaaaataactgcttttggcagtgattcgtctggaatgtacaaatcatatgggtgcatcttagaatagaagctacgaagcacttcaataggaactgcattcgcgccacgatagaggttacgattaagcaattcagtccaaggaacgtcaaagcgtttaatttcccacttgacaccatcaatttcatatgccaactcttgccacttcttgatagtcgttggattaaggttagtatcagcaatgatgacacctttagtggtttccatctcgagtagagtcttcgccatagaaaactgacatacagatacggacttctcacgaagcttagaatatttgtaatcattacgtttatcaaggccaaagatgccttcacgcaaatcatcacgagacaaaacataccaaccaggattagctgctacgtattcgttagcccaggttgttttaccagagcctggagccccttgtgtcaaaaccaattttttcattatacatccttaagagtgtcaataaaatcatgaagagccttagacttttcaccccaattagcacgatatttttctttaattgctcgcaatggcttattcattgacagtatatcatttttgtcataattttcagctgcgcgtccaaacacgatgcacgccaattcattttcagcaattaaccctttaagtgtttcatactgctctcggttcattataataccatcacttaatacaacgtggttctttaagttcagaacgataataacatatcattccgttagcatctttagtataacgtaaaatgtcattcatccagatgcgatactcttgagactcttcaaacggcataccaacccaggctttaccgtcaattacttttacttcccaatgtccttcccatttttgaattgggtctggccactcaggatgcaaaaccgggacatccggtgcactagaagagcatccagcaagtaagctgataatacccatggctaatagacttcgtttcatctggtagcctcctggatatcttctgcaaacttattgaagcttgcattaatctgtttttcaactaacccaggtttagctgcaactacgtttccacgcttagcatctttattcatcttagcgttggaagtatcacgagctgctcggttttcctgatagcctttataggttgtctgcagattttttatagaaacaccgatattttctatttcttttgcttgtcgatcagattcatcttggacgactttgaggtcagctttaagattttctacccgccacgaaagatatttcaatccggcggcggataatgctaacactccaatcatcaaccaagttgcgtttattttgagcatagtttaaggataacctctacgatatcatcacgggataatcccgaaatgaggatgtgacgatcagaactttccgaaggagaacacttgaagcaagcttctacatattctgccatctcagaataattcagctcgcgatgcataatgccaagacgatgcttgccataaatcgggtcaacgattacatagcatttgcatccgttagcatgaacgtttggctgggtgatgttcttgaacacctctgcaccatacttcgcgagatgattatctaggaaatcaatcatttcatctacggcttcaggaagggcttcggcacgctgctcgttcacacgattagtgtactctttttgcttcttacgagcagcttccttgcgcgccatgtgcgtccgtaggtcagtgacgaagcccacctttttggtaccattccacacaaaaatcccatcagaatgagtaccatatttgttaacaaccatatctaaagtaattgcttgcatatccatttcaatatcctcatcagtttgtgtaagtttatagtatcacactctgatgaggatgtaaacaactattcttcagaaatttcaatttctttttcgtactcttttggaacatatcctgcccagtacttcaagaacactctttcaaggtctttaagcagtttatctacatctacagttccttcgtacatgttcatgataacaccaaaaagatgacgctgattaaccgttgctttctgagcagcaatagcgtagtctttacgagcacggcctctgtattcatcgtagaacgactgacatagctcaagtgactttccgaggtaatctagataagcttgttcaaacgcagaaattttcttaattgcgtattcgtctccagcaaaaagagaacgcaagtcatcggaatttgcagatacgacagacgcaaacagtctttcatttgacgttattgagtctttagtgtgatgaagagcagagtaccattcggttttaaccttaaatctctgcccagtgtttagaactgcaatgtacccttctacgccttcaagttcacgaacaccttcaacccaagtggtggggtcagaaattccgtaagcactgattaaataaggacgaattttagcattagcgtacaaatcatcatacttaacatactcgccggttgcgttatcacggacgtttaacacaaacaactgtggctcctgatatgctaaaacaacacgattattaggtgaaacaaattccatgtttaccgtataaccatctagcgctagctcaagaataacctgatgaagcgaagaatattcttcactgttaagcaaagctgaagcttgtcttgcctggtcactgtagagagatgtttttgacttaaggtatagatacccatcatcgacataagatgatactagagagccatcagccttatccataatgtattctacatcgctaatatcaattcccatcgttagtgggttttcattcaaattgaagaatttttccatcggacgcgaagcaattcgaattggggtatcgccatccatctcaaacatgataccgcggcactcaagagcatcgggttttaaccactcactgtagcttgcgtagtgatatgaaaacactctgaacttaccatccataggaccggtaaaatctttataaaagaattttgcaacttctgagctttcacacagattcattaaatttttatatagctctaacatttctttaccttatgttgtgtgttccatggaggattgaacttcttaatcagaagtggttcttccaagtccatagtggatattgacatctcgccaagttcattattaatcgaaagattaaagcactgacgagcatagaactctacttttttgccagccattaatgcttcaaaaatcttggcagatttagctgaatcagaggtttggtctttccgattaatagcagttctataataatttatacgtttacgaagattttttgtcttaccgatgtaaaccagctcatcatcaactgcgatggcataaactacattcaacttgtttgctaccaaaacgggtttaatactgaaatcaggttctaactcaagttgaacatattttataaaagaaaactcgttagcaatatcattcataataaagaggggcccgaagcccctttccttataagtactttttaaatccaattagaacatcatcagtgacatcattgtcaatctgagctaccagataagaacttatctcaacttcctgaggagcagattggactgcatcagagttaagatattcgcgaatccaaggaataggatgtcgaataggtgcatcagtaatcggacaaggaagaccacaactacgcatacgagatacagtcagatagtcaatgaagtcatgaagaattttaacattcagtcccggaagaccaccgttgcggaaaagatggatagcccaatctttttcttggcggttaacttccatgaagattttaattgcttcttgttcacactctttagcaatctcaacccattcttcgccatcagtgccagtttgaagttgacgcagaatgtactgtgtgcccttcagatgaagttgttcatcacgagcaatgaacttcatgattttggcattaccttccatgatttccatatttttatggaagttgaaggtacatgcaaaactgacatagaaacgaatggcttctaacgcgttaataacatgtaaacaaaggtacatagccttcatcagataatgcttagcttgtttaatctcaatgttatctggattaaagcagcgttcttgagcatttagccatttgcggtgagcttctgtaacagcatcatagtaaacaccgatagattcagcacgtttcatgatagcttcatcaagaacgatttcatcaaagattttagctgggtctacataaaggttacgcatgatatgtgtgtatgaacggctgtgaatagtttcactgaacgtccaagtctggttccaagtatctaggcttgggtcagaaataagtgcagataaaactgctgctggagctcgtccttgaattgaatcaagaagagattggtacttcaagttatcagtgaagatattacgctgatgttctgggagtttttcaaactgaccacggtccatcataacgttaacttcttcaggacgccaaaagaaactcaattgcttctcaatgagttcctcgaatactttatgacgctgaatatcatagcgtgcaattcctagaccagaaccaaagaacatcggttcggtcatgatatctacttgcttggtattaaaaactgtactcattctatttcctattctgtggtgttaaccatccgtggtctaattataattcccttttattaaagcttacaggccgcgcagtcagcagagtcttgaatcatatcatcgttaccggaaccgtcacgggtgttatgatagtaaagagtcttaccgccaaagtaccagaaataaagcaagtcgtccatcattaccgacatttcaactttacctttagggaaattcgccgggtcgtaataagtattagcagagatgctttggtctacaaatttctgcataatcagaacctggttcagataaggcttattaccctgtttcgcgagctgccaggcataatcataaagggaagcattgtgttcaacatttggaacgacttggttgaagcttccttcttttgattctttaactgacactggtccacgtggtggttcaataccattggtagagtttgatacctggctagacgattcgcatggcataagcgcagataacgttgaatttcggataccgtatcgcttgaggtcttctcgcaggagttcccagtcacagacatagtttggagctgcgagttggtcaattctttcgttgtaccagtcaataggcagttcaccacgtccgtatcgtgtttctttgtaaagcgtgcatggacctttttcgctagcaagtttaacagaggctttgatgagtgcatattgaatacgttccatcatttcgtgagtaatatcattagcatctgcgtatgaagcaaagttgcttgctaaccaagctgcatagttagtaatgccaacacctagtgctcgacggtctttagcttttaacgctttgtctacaggatagtcttggtaatccaaaaggttatccaaagcccttaccattacttctgcgatttcgttaacttcttcttggtcttgccagttgaagttgtcgagtacgaatgctgcgagtgtgcatagcgcgatttcgccatcttcttggccaacatccgaagttggtaacgcaatttcgaggcagaggtttgattgcttaaccgtagccacatcacgaataaaaggaccatattcaccaacgttatctaccatgtacgggtaaattcgagcagtaccagcacgttcagtaaggaacaactcaaacagttcacgagctttaatacgtttctttcttatatctgggttcttttccagttcttcatataatgtacggaacgcttgagcatcacggaagtattctgtgtacaaagtaccaagacacacatcgggactgaacaatgtgatgtaatcattcttaatcaagcgttcaatcatcaggttattaatctgaacaccataatctaaatgacgaatacggttttcatctacacctttgttgttcttaagtacgaggaggttttcaacttccaagtgccagattggatagtacagtgtcgccgcgccaccacggactccaccttgggagcaggatttaactgctgtttggaagtgcttccagaaaggaataactccagtatgtttgacttcaccgaatccaatttttgaaccttctgcacgaatcatacctgcattaataccaatacctgcacgcttactgatgtattttgtaattgacgcagcagcttcattaattgaattaagactgtcaccgccttcaataaccacacatgaactaaactggcgtgtcggagtacgaacaccagacataattggagttggcaatgaaatctttttagtagaaactgcatcataaaaacgaataacgtttgctaaacgattttcgccatcgtcttggtgcaagcacataccgatcagcataaaggcaaactgcggtgtttcatacaattcaccagtgtgacggtcttttacgagatacttctcgataagttgcattgttcctgcgtaagtcatagtgaaatcacgctcatgcttaatataagaatcaagcaaagcaatttcttctgctgaccatttgctcaggatttctttatcatacttatttgcgttaacacaacgagaaatgtggtcaataaatgcaggcggttcaaactgtccataaacacgcttgcggatttcaaacattgccgcattggatgctacatattggtaatccggttcatcaatagaaatgctattcgccgctaccttaacgatagtcttttggatatctgcagtgctcatgccatcacgtagatgggatttaataatttcatataactcgtatgggtctactttggttccttcgcacgcccattcgaggactttaatgattttctgcatgtcaaattcttgactaacacctgagctcttaattacttgcataagtcctctaattcaaatgtatctttaaaaagtttattcactacaagagctattatatcaccatggcaaggaagcggtttgcaggtgcatcctaatctcattcctcttaaagtttctaagtgctctcgctttatttctccgttccgaatcttagcaataaaatcgtccttaaacgcagcaatagcatcaggacgattatcgcaatctttaccgacgtaatttccccacattgttcctcgttggatatttacatcgaagtcggaatggtatttattaaccacccgacatatcttcatgttatatcaacttcaaaccaacagattaattgtgttttgcctatagaccattcatatgatttaacaatagacagaaccctttgttcgatcccgtcaaaaactatcttgtcattaacttcaggcaaatcgctagagaatgcatcacacatctcgcctaatattgtttgtcctttacgaataaatcgaatattcatacagccattttccccttaattgttgagtgagattcatatccaactaattcaaagtggtgtggacgtgcaaactgctctaaccaacgaacctgagaaccagtctgccatgtttcatacgtatccggaaatgctattttaagttcgcataactctttaggttctcggcggagaatttctttgcattgctcaatgtgattcatgtaaatgtgagtattaccaccagtgaataccaaatgaccaggtttaagattggtcattttagcaataacatgaatcaatgcagcatacgaagcaatgttaaatggaagacccaagaacacatcaacagaacgctgataccactgaaggtctaaatatccattgcgaacgttgaactgatacatcatatgacacggtggcaatgccatcaggttcaaatcaattgggttccaagcagtcacaatctgacgacgatcagttggcaattgcttaatacggtcaataaccaatttcaattggtcaacacccatgaaatctcgccactgtttgccatacacagggcctagttcaccaccagaatatcccatgtcttttgcctggttttcatagttgtcgtcccagacagttttaccttctagcaatgaaccatgctgaataagacgcaattcatgaacattagtagaaccacgcaagaaccaaatcagctctgcaatgcatgctttccatgcaagacgcttagtagttacagcaggaaatcctttttgtaaatcaaaccgaagctgggtaccaaactttgcgatagtaccggtaccagtacggtcatcagtctcgtatccattttcaaaaatatctttaattaattcttggtattcacgcattaaatttttcctgaagaggtgtaaagaaaagctggtctccacgcttttcaaatcgtccaataatagacactacatcatctttgaccatcacattgccatgtgacattccgatgaacatcttcttataatcacgttcaatttcaataggtatatttccacttcggttatatactgtagttgaaccgttataagtgctaagaccattataactgaaaactagaagatgaataccatgcttaaatggaaatcttttccacctcttttggactttgtcttctgatagctgaatgatatcatagtttgcgctcatagaccacctctgaaatgttagtcacttcatcaatatgataccagtgattttctttagtaatgaatcctgattctggccaagtaggagccaccacaaacgcaataggcagagtgacatcagaattcactctatgactttttctgatgattgtttggataaccttatctgcgtatggatatgccttctggatgattccggcaccacctatgatagaataattaaggtctctattaaaagtgatagtactgttgtaagaagtatgagcggccataatgtcaccacccaagaaaccgataaattcttcttcactaacatacgcgtcagcaaaaaatccgtttttagcagttgccaacgcacgactcatgtcttggacaacgattgtcttacgaccaggaagaggtttaggaaaactcatgaaagtctttgctccgcaaatcaagatagtatctcgagtacgattagcaaagtttttcatatcctgggaaatatgtttccaaggaagaccatcgcctaaaccaaaagcattttcgtttttgccatctacagtttttgtaggagcaaaggcataaactatttgaatcatttaaacctcaataaaatttagccatataaaaataatcctaatataatgccgctaataaaagctgcagtaacagaaattagcaaaactactaattcagcctcaatcatttcttggccttagcaagtttaaatgcttttttgaattcttcaacatcttcaactggaatccagaagcctgagccatacccatcttcatagcatggacagttatcacagtaatcattccaatagacagtttcaccacccatagtgaatggagcttccatttggcacagtacttcttcaacacgctctaattcttctgggtttttatcgcaaatgcagaaattccatttaccacgatattcagaaccaagtttgatgctttgacgttgaagtttcatttttattctccagtagattatggagctatactatcacaagcatagctccgtgtaaacagttattcttcaaaatcttccataaagtaatcaatgtcgtcccattccagagattcaagatatgcaataaccttttctctagaaccgcggaggtcaatatttggccaaccaccaccaggtccatgacgcacaatcaagtcaaaatcaataccatggtcagtgtcataaaaacgtgtaccatctgcatactccaaatctacacaaataccgtctttgttgataataggagttgctacgatatcaatgtttaatttacccatgatgttttcctctactcattttgtttcgatgtagatatagtatcactcatcaactggcttgtaaacaactttgtgaaaatatttttggagggataaagaaaaagggacccgaaggtccctttatattagaggtcgttcagaatatcattcagatcgtcatcgccaacactgtcaccagcatcgcccatgatatcgtctgcggaacgagaagaggtcggtttggattcaaaatcagacaggtctttgtcaaaggaatccaggtcatcaccaattttatcggcttgagctgctgcttttgccgcggcaccaccaagagctgctgtacccataatctgtttaaatttggcttcgttaacttcaaacgatttaaactgagatggagccacaatttcgctgaggtcagccatattttcggtcaggaatttctgagtttcttcatcattgatgtttgcaatctcggactgaccaaggaatttacattcatcatagttctggaaaccaccgactttcttaactttcatgacgaagtttgcaccttcatacacgcaagttacatcaaccggagtttcacccatatcaacatcgacttcaaccatcgcgttgattttgtccataattttctgaccgaaacggaatttgaatactttaccttcgttttctgggttagccgggtctttaataaccaggatgttagaccagaaagaggttttacgtttcagaagcttatattcagctgggttgctgttataagaatcgtttttactcagatgagcacaaaccgggcaagaatcaaaatcaccgtgagtagaagtacatgtttcaatgtaccatttaccgccgtgtttgaaaccgtgattgatcagttttacaaacggtagagagttttcatctttaccaggcaggaagcgaattactgcttgtccattaccagcattatcggtcttcagtttccattcgtttttgtcttcgttagagaaagaagaaccacctttcagacccgccagttgttgttgaagttgagcaggatttttacgcttaaacatatgattacctttttaatttaacagttgttgttgcaacatgggtccttgcaactggacgatagattaattatatactaatttctttacaagatttgattatgctaataaagagtttcttagcttcagcaccgtcaacgtttaaaagttttttataagcttttaatttagtagagtaattactccaaactaagttatccgttgcagtatcatgtgtatttattatatctaaaaacgagtcaagcatgatgaatgtctcgaaagatataacgtttgactgaagaagtttgaacacataagatgttccgactttctcattatattcaaaaatatcatgaagcttatctacattaactttcttagcaaagtagtaaatattctttacgtcttcagagaatgtatttttgatttgcttcaacttaccgatgtattcacgatagaatatcaacgcgtcagcgtcactgatatcaccaatccatgcatcttggttagctacgaggttactcatgaatatcagtgttaactcttttaatgtatatttctcagcgagtttctcaaagaaatatttgtctctacgcttttgataagctttatcagagacacgcatgacccaattatacttaacaacatcatatcgaccagcgaagtgttgtttgagcattaaatataaaagataaacgctcttaccgttaacgtatctattattgttttggggcatgcgtagacgaatcataataaaaaatccagactattcgttttgtgtgtttgactaaatgatggacgaagcatattttcttccaatgcttctgacataattttttctatgattgctggaggaatatatctattgaagtttccctcaggaatagaattttcttctaaccactgagttgttgcttcaagataccccattccaagttctgttaccatagattcgatagcaaatccattagcttgcttatctagcagctggttaatggattcggagggggacacatccccctcatctttaagcgaaaatagagtcataagcttctaccacttcgtccttttcagtttcataacgatcgcgtgtacctttatggaacagggcaagcagctgattaaataatttgccttctacaccaagctctttcttggcgcggtctttaatgtctttgttaagctcaagatagctttctgcttttagcttattacctgaggcttccttaatcatatctcgcagagcctgtccatgtaccgcttcatcaaatactacttgctctttttctttcttagccattatattcaccttaaaagttgttaatttctttcattaatttagacagaccggatttaacaaagtagctataaattttaccacgacccggtaattgatagttattataacaatctaaaatgttagcaacaatgtcttcgcggatgtaatcaaaatcgattaacacacggttttccaagaaacgcttatactgttcttcagtaagcaagtctttaatgttttcgccagcatcaagacattcttcaacaaatgtcattttcgttgaaggagtacgctcaccatcaacatgagtgtaccaaaaatctgaacgaactttaatagaagcgacgttatctttcttgtcacctttaataattttaaccatacaatctaaagcaggagaacccgttttagatttcaccaatttcttctgcattggtgaccattgcttaacattaggatacttatgcaattgagtaaagtcaccatcagaagaaacaatcataacaggatgaccttcgagactgaactttttggtcagtacagcaatactgtcatcagcttcagctttatcaatgtcaatgacgtaataaggcatatactgcttaaattcatcaattacagtacgaagaccttcaaagtaaccttcccaatcccaattggattcttcacgggctttagcacggttctttttataataatatgctacatcccggcgccagtatccattgattgcattatcaacacaaatgacaatttttgtgtatccatctttcttccacttaaaagcattaaattttaaagtagaaagaataagatgacgaaccataggagtggttagtttatcgccttctttatacgtatgaaggattgtcgccattgcgatttgcgacaagtcaatcagaatgacgccttcttttacttggtcttcttcggcgaataagcaatttaaatcagacatttgaacctcgttcaattagttagtacagccattataaatacttctataatgaagcataacccccataggagactctatgagcgatttactgaaacaacatttccgtgcaacgaacggcttggacgcaggcggaaataaagttataaatgtggcactagctgaccgcaacgttaaaaccgacggcgtctccgtcgagtacgttattcaagaaaacactatccaaaaatatgacccgacgcgtgggtatctcactgattttgctgtgacttatggacgtcgtatctggattgcaaataaagatattccaaagcctgctggaaattttaaccaggcgaattggacttctttacgtgttgacccgaactggatttataccgtccgtaaaggagagtttgaaattcaatctggtcagttcatcaacgttgactctaacgctgcaggtaatgctacattactgcttccgttagcaccagatgaaggcgataccatcgtagttcgtgatattggcgggcgtcctggctataacggaatcttaattaaagcgcaaaatactggcgcgtctatcgtatttggtgaatcgcgtctacgtgaggtaagacttacacgtccgtattcacaaattatgcttacgtttagtaatggtgcatggcgtgcaagtttaaccgattttggcgatactgctaaaatggtagttccgaacgggattgttccaactcaggtacagtcaggtgataacgtagttcgtcgttatacttccaactcagagatttttattactctgccgttgttcgctaattcaaacgatatcatcaattttactgaccttgacggtacatcgccaattaaccatatgactgtgcgtacgtttgacccaactatctcgattgggactcctggacaaacagaggttcaagtacgtacttcaggtaatggatttttggtatatgactcgattgacaaaatctggcgtatttttgaaaatgatttacgcacccgagtaagaataattacttctgacgttactttaatgcctaatgagcatatttctgtatttggcgcagataacaataccgttaaaacaattaacgttactttgcctacagacgtagctgttggggatactgtcacaatcgcaatgaattatatgcgtaaaggacagactgtagtaattaaagcttctgatggtgataccatcgcgagtaatttgaatttactgcaatttccaaaacgttcagagtatccacccgatgcagcatgggtgcaatcaagctcgattacctttaacggaactacatcgtatattcctgttcttggacttgcatatattgaagataaagcatccggaaaaagctattggattgtaactgaatctgatcctaccgtagaacgtgttgatgctaaagacaatactaccagagcacgattaggtgttattgctcttgctacacaggctcaagctaacgcggagtcaagtccagaaaaagaattagcaattacgccagagacattaaatggacgtcgttctactgaaacccaaactggtatagcaagaattgcaacttccagcgaagttaatcagtcaacaactgcttcttacttggataatgtaatcgttactcctaaaaagcttaacgaaagagctgctactgaaactcgtagaggtttagcagagattgcgactaatgctaaaatggacgcaggtgaagacgattttacaattgttactcctaagaagttgctttatcgcactacatcggattcacggttaggtgttattcaattagtaaaaactggcggtgctcctaacacaactgctgatcgttcttctgctggcaccggtatattcgatcattctgattacaaaaatgcagttactccaaaaactcttcgcgagtataaagctactgtaaatcagtcaggaatagtttggttagcaagcgatagtgaagttagaaacggaactccttctgcttcaaatattcctacagtcgttacaccggaagctttgcataaaaaagttgctactgacggagcaattggattaatccaaatagctacacaaactgaagttaatgctggcggcgtgactaataaagcagttacacctaaaacattaaatgaccgtacagcaactaacgatcgtactggtattgctcgcttcgcgacacctggtgcccagggtgaatttgaagctggtacttcaagtacagtaatggtaaaccctaaattattatttgataaatttgctaatactgatcgtatccaagttaatactagttctggcttaactattactgggaacctctgggaccattataccatcaacatacaggaagcaagtacttctcaaagaggtacaaccactcttgcaactgctgctgaggttataaccggcaccgacgccaagaaaatagttacttctgccacgttgcacgcgaaaacagcaaccgaaggagctatcggtcttgctcagtatgctacacaggcacaagttgatgcaggcacattaagtgatagaattgtttctcctgcttacttgaaacagactattcaggtaacagagtcgtggcaagctacagacagcgttagagggaccgtgaggctatctacaggcgatggaacgtggaaaggtaatgataccgatggctcaactcttccggataacgggtatgcctctaagggcgtcgcagtgtctccatatgaattgaaccttacactgaaacattacttgcctcgtctcggtaaagcctatgacacaggaatgttaggtggtcaaaccccagacaaatatgcccgtcgcgatatagcgcaaactatttctggagcttggtcatttagtcaggacacttcatttagcaataatatttctgtccagaatattatatatgctaatggtggtgaagttaaaatttctccaactgctgacaccggaaacgtgcatgttcgttttcagaatagagatggaactgaacgtggtataatttatgctgagccgcaaactgcttcagctggaactttaaaaattcgtgtcaaaaacggaaccggaactactgctacaagtcaaacttatgtatttggcggtaacggtacgttagaagttcctaacgaagtgtcaactaaaactctgaggtcttctggaaatgcaatagttggcggaactgttatggttaaggacgttcagatgcttgccgtcgagggattgaattcaatattcggcgcccaatcacagtccgcatttattcgttcccgtgacgctgatacacaaatttttgcacaggattcaactggatcgtatccaattttaactaccaaaaactatgcaagactagctgatggccgttatgttaataaagctggcgataccatgactggtaatcttaacttaagcagttctgctatcgtcattacaggttctgaatcatggtatgttccaacgaatgaaactgtactgagacaaggttcttggactgctgaaattaaagacgctactaaactaaaaggtcttcgcggttatatggttccaatcagaacaccgattgaccctgctaacccaagcactttagtagtgaccggatatgaagaaaaaactgcagctggtggtgttttaactcaggttggtgtaactacaaacaatacttatcaactttggacgccttatcctccgacaaccgaaactgccgataagcgtttcgcgcatactgtgtggatgaggatttataatccaaaccttaataagtttgatgattggatgcgagtgttcacgtctgctactcctccgactgcagctgatattggtgctccgagctcagtatcaactcaggttaaaacccttgaagtcctggaatggattaagcttggcccagttaaaatctggccagaccgtccaaaccaaactctcaaatttgaatgggtaggtgattaatggctgaaccaattttaatggcagcctttggcgaggatttcgtggaaacacgaatcctctctgaggcaaactctgtgaagtattggctaaaagcttatgctacgcattctaatgctgttcctaataagccagaattgaatattaatggtgcctttgatatgacctcctccttacggagggggattaatgttgttcaagttaatggtgacagttttattaactttaaaacatttgacgttaccactgatgataacaacgctaataacaaagcatttgtagaatatgcaaatggattaacttcgggattgtatattataatgacgcatgaacgatttcagtctagtccgttgatagatagatggtttaaaaacaagtggtctgcttcttggccaggttctgacttttctaaatcatttccaaactccgcctatgttggagtgctcggagcagcaaaaggacgtatattaattgagtcattttacggaaatgatggcgtagtcaaagaagattccagagctaaagtcgatacagtgtatgataacgttgacgatgtaggatatacaggctgcccttatcgttccattgaagacactaatgagtactcggattctactggatatgaatataagcgatatccagtacaaaatgaatctataagcaaaatcgctgattatggattatctcccggggattcggtgtttttagtgtgtgatatgtatgcatctaaaagccttcttgatgcaggttctactactagggctaacttgagatggttcaagggcacatctttattatcttcaagcgtatcattagaaattccaaaaaatggagctgatagatggctaagatttgaaagatttaccgctgttcctacagacgctgatggatttactattgtggtatcacgatatccaaaaacgtccgtagttggtgattctaaaatcaaaaaccttgtatttgttcaaaccgcgcacagcgaaaaacttaacagtgttgttcaagaatttggcgtgaatggcgtaagaatgaataaaggcgttgaaggaggaaccacagtgattatggaacttccaaattcaaaagtcgatccgagtggtgttattccagttcaatcgttcagagaaacatctgattaaggaagcctttgggcttccttttttcgtataaatagaaaatatataagaggataaactatggccgatttaaaagcaggttcaacagttggtggaaatcctatttggcacgcaggtacttttcctcttgtgccggcaggaaactccctaacttatagaggtgtaaaggtttatactgagatagataaacctcaagcaaatgataatgatttcgtatctaaagctaatggtggcacaggttctcaaggtttccaaaaggaagtcgaatttaaagaaggcgtaaaagtttctgcgaccttcagtggcggcaacagtttaaacgggctttattctggtaatggagactcagcatctctaacaacagcgaacattgacattgtttcatggtacggtgtcggtattcgtacttcactggatggtagagaacggacagtagtttggaacgctagaaccggggaccaaataaacaaaggaagtataacagcttctattcttagttctaataatgctcctacagccgctcagcatttaacgcgtaaagattatgtcgatggacgaataaatactgttagcaacgtagctaacgcagcagtcaagaaagctggtgataccatgacaggtgcactacgagctgaagctggcgtagttatagtaaacacagcaacatccggtgaatatgctcctagattagatcaggttatttcacgcggggtaacaatagattttggcacatactaagaggtagccatggccgatcaaaacttaaaacaaatacaatttaaaagaactagcacagagaataaagcaccaggtgcagatatcgtagcccgtggcgaaatcgcgttgaatacacatgggcgtactctcgctatctataccaaagatgaagctgataatgttgttcagcttgctggtaaaggtgttcctttcttagatacatctggaactcttagcgttgatggaactactacattaaaagacaacgttactatttctccgaataaagcgatcagttttgaaactactgatttaagcggtgaaataactcgtcatatcgttggcaaatgtgctactaatgatggctggtacattggtgccggtggtacaagcaataacggcattcttgaaatcggtactattgacgatggtactgaaacaatccagtttgtacaacgcggagccggcaacgtcgaagcccgaaaacttgtcttacttgatggttctggtaatactactcttcctggcgatttgagattatccaccaataaagccattaaaatttacagtggaagcactagtgttcttgaaatgggcgtaggagctaatgatgtctatattaaaaaccaaaaaggcgcaggtgttcttcaattaaccaatgatagtaacctgacgttcagaaattcccaggtttattatgccatgaacggaagaggtcctggtaaatccggtactcttctgacgaatgtagaaaacaatcgtcaagcctggcaatataccatttctgctgcaactgcgtcaactccacgctgggtaaaagtagctacaataaagcatccaggaatgggttcttcgcaactggatttaatgattagcggtggtattgattctgggcacggtagacattacgttgattttatcacgttatcaggacgaaatttaacatcatggagcaccaacagtttagataactgggttgaatggcgccgggttgggtctccttctaaaacgaacgttccagagtattacgttgttaaaaacgattctgctacagattcagaggcttcatttgatttttatgctaagattcctcgttatggcaatggcctttatgttacagtgctaaacactactggatacaacggccaagattcaggtacagtaattatctatgaaaccaatcaggacagtggtgatactggaccgtctggaagtattcttgtttcaatgaaacagatttttgatagtttagcaaaaccagatttcggtgataccacaggtactcttccggttaaccgtggtggtacaggtgctactaacgtaggagacgctcgaaataacttaggtttaggtactgcggctgttcgtgatgtcggtgaaggcactggtaatgttttagaaaatggcgcttatggcttaggtggcaacggtggtaaatccatcaatgacattgtctctaacgctgatatgttgacacgtttaaaggcttatggcggtactttctggcgtggtgttactaaatctggtgttagtgttcaaaatggtctttacaaccacggctccggtatttttatgaatgctggagacaccatgtcagccattaatatcgactacgctagtgctaaagttcgcgtatacgcggctaacaacacggctcttgccgcaggagatgtcaaatacaacgaactttacggcacagcaaataagccatctaaggctgacgtcggacttggtaatctgacaaacgatacccaagttaagaaagctggcgacaccatgactggtgatttaactgttcctaatttacatgcttccggcccgggtactgcatcagtatatgttaacgcaggaagcggaaacgctcatgtatggtttagaacagacggtaacgaacgtggtgtaatttgggcaactccgaatactgctgacttaggtcagattaatattcgtgcaaaaactactggtgatgtttctgccggtgattttagcttccgttctgacggccgacttgatgttcctgtagcagttaaagttggtggagcagcaatgctaaccaaagacgggaatattacctctggttcgatgtttggtggtaaccttaacaactatttgacttctattaaaaatgatatcaccactggcgatagtaagcaagtaagcaagactggtgataccatgaccggtaacttgactattaacgctaacttaaaagtcgaaaatcccaatggaacgatggttgatttaggttcagagaactcaaacaaatacagtagattaacccttgcccgtaaaattggcgatggcgctacagtagcaatgcttaaagttactcctgaaggacatgtgcaatttggttatcaagatgcagttgctactccagctcctaccaagtacatcctggttaaatctaacggccttgaggtagaaggggacttggtttttaaccagacgtatcgcggtactgaagaagctgttgatattactgataagactaatgaccttaacaacatggttattaaaggcagtgatttaggtactcgtttattatacaagtgtacttctaccggtggtggttctaagatagcaaacaaacccacatctgatggtaactttgttctcgaagttctatctttgcgtaaaatttctaataccgattggacatgtaagcagacctttactacaaagaacggaggctgggaaggcacatttgttcgatactgccaaaacggcacatggtctgcatggaaagaggttgttgctggtgttcaaccaatcaatttaggcggtactggagcaacatctgtagatgctgctcgtaataaccttggcgtaggcgaaggtcaaactacgacgtttggttctttaattttaaacggcgtcggcgataaagatgctactttagattttaaaggcggtgctagaatacgtggtggacagcgcaccggtgagggcgctatgatcctttcagccgcagcagacgcggttggaaaatatatcgcttttcgacccttcggtgattcgtctgttactgagattagagtaaaagccaatgagtcaagtgagccattacttgagtggtcttatggcccgggtattcgttcaaattcatctggagcttttgttatctacgcaaaaacaggtcaggcactccatttaagaccaaacggtgataattctaaccaagccacagttattgaccaaaacggtaaaatgacagtcggcggtgagttcgaggcccagaactcaaaaatcacaggcaacttgaacgtctctgaagataacagaatgatcgttcttggcaaaaactccgacttcgggttggtcaagaaaaatggcatgccaggaaaaatggctatcggtaaatctaactcgtttactgttatggtatcaaccaataccaataaccaaattaatcctgctgatacgtttaacgatatattcaatgtagatgccgacggaaaccaaaccgtttacggaaatgcccaagttaacagacaattaactgtttctagttcagctactgttgcaggtgttattaatgctaacggcggtattattgttcctactaccaagtatgtgcaaattgccgatgctcctacgcagaataaccaagccaccaacaagaaatatgttgatgataaggttgcttctgctattagtaatgctggtgatacttatcttccattagcaggtggtactgtaactggtccattaaatattactggaaaccagttaaaaaccacatcgctctgggttactggaaattcggcacttaacggtgccttagaagtaggcggtaatgttgttagtaatactggtattggtagttttgttggtgctatagatgttaaggcccctgccgtagataatggtacaacgcacctttggttccgacattctaacggtggtgagcgtggtgttatttatatgccgcgtgacaataataccatgatgggtttaagagccggtggaagtgaatggcaattacatggctctgcaggccaaatggtagggccaggcgcacggtggagaattcattctgatggtaacctacagggtgatgtttacggtggttatatcactaactatatcaacgataggtttaaccaatgtgcacagtgggttcgtactggtgctcaacaagactttggtccaattggtcgtccagcacctggtaaaactgttcctggtggttgggtgcttgttggtcttaacggtaacagtaacgaagctaaccagaatatgcaacttatcggtggacgtttacaagtatggaaaccgggcgttcaatgggttgattctgctacttgataataaggggcttcggcccctttaaacttaaaggtaaaactaatgattattaaacaaatgaaaggtattcaatggcatcacaatttcgagggcggagcttattatcgagactgcaacgacaagtgctggtattcttttagaaattctctcgataaaaattctcatatcattatagttaatgctaaaaccaacaagataattaattactataatggcgaagaccccaccatgatcgggttatttgcagataaagaaatgattttggatgtataccaacttgacgattttcctgttgattcatgggatgaattcacacaaagagaatttgaatttgtagacgaacaagttgtgatgactaaagacgtacaagttcctaaagaaagaactaaagatgacattatgaaagacttgatgaagcttaaagctgaattggaatcattgcaataaatatctctgtaaggagagcaatatggcaagcaaacaatcaataccattttttgatatgtttcttgggttgctcgagctattattcaaagatggagccacgggaagagttctcttttcccgtgtttttgttgtcatacttttagcattgttggcatttgctggttataagtcagatagtcttattactgcttacgtcgatagtacttatgataagtatgataaactggttcaaaaggatagagattcccgatttgataatacagcactcgaacaactccagatagtacatatatcaagcggtgcagatttttctgcggtctttacgttcagacctaaaaacttgaactacttcgtagacttaattgcttatgaggggactttacctagcacggtagattctaaaaacctgggaggatatccaatcgacaaaacgtctgctgaatacagtacgcatttatcgggtagatatttttggacggataaggaattcgttttcttaccgacaaaaagaaaaccgcctgaaatatcgtacatgtttagctgtccgtatttcaatttagacaatgtttatgctgggactgttgaaatgtactggtacaattccaaacctgcattatctaacgaaagactaacatcgatatgtggtcaggcggttagagctcttggaagagctaagtgattagttattactatgcatagccattgttcgatagatagactcaaatccctcgttgtattcttcaacgagaattctcttctcttcgtcagttaactcagaaaccattttacgaaagttgctctgatttaactgacgcccctgctcgttcttgattccgatttcattcaagaacgcaataaattcatctcgcttctccatgatatgttcagcattgaacttagtcagaatagaagcaacagtaacgatttcttggacaatttcaaacttagtcattatttttcctacaacttaacggattatgtggattatagtatcatcttgataccgcgttgtaaaccagtttatgccaattcccaacgagaattcaaatcttccttggtagtgatatactcagcacctgaggacatccagagcccgtagcgaccatcttttactctagccgttaaataccattcctttccaattggacgaaccctacgattcaaccagtgacatacgtcaattgcctcttgaaaagacaagtcaatcagacttccaagcgcgattttattcattaacgcttcaagatatctttgtgattcaacgacagattctaagttatgactcatgctaaaaccacctctccacgattacctaaaatgctttcgatatactcaactccacttataatgtcacctctatcctttgctttaatagtaataattccatacgtgtaaaagtcggctgacaaactgaatggcttagaagtgtcctggttaaacgtagacattactgcttgctctaaatgttttacttctaagtcattagcccaagagttaagaactttaagcctaacttgtaaggtgtattctactttaattgctgaaagcaattcaacacgtttatgatatgccttggcttcatcttctctgcgtaaagcttcagtattcatagataatctccaatatcataagcatcaacacatttctgaaactgttcaataacttcttcaggttcaacattagcgataatagctacagtaaaggtaccattattccaatcgtgtaccatccagtctccatagccagcattctggaggtcttccattagttcagaatggatatctgctactaatccagaatggtcccctaatttcttgtggagagcttctaggtcatcacaaataatagttaaagtagtacatttggaattattcagaatgcgcattgtctttacctttgtgtttttgcttacgttttgattctttggcagcgcgctttttatctttatgcgcgcctcctttgttaaagtcattcttcgctactgggttgtacatgtgcaattacctcatttaagcagttgcgtgtaatatcaaaacgcttagcaataccacattcttggatatgtgcttttaaatctccggcatgcacatatcccaattccaagataaaccgtttaatttgagccttttctgaacgatttaagctattgaagtaatctgccttggcgcttattgttctcacgctttatcttccttacattcaagttccttgatgtaatagtcaatatctttaatcatttcttctgtcattattttgtacatttcagcaagaaatggtttagcaccaccattaaatggatggctaaacgggcagatgtattctttatccatgagagttttcatgaatttgctatctgccattttaaacccggcttcattggtatatgtaccccaattattgtccatcatttctaatgagcgctgaagcgatttacgttgaatttttaaaagtgtaatgttattctttaatgtactaatcattagtataaatcctctgagaataattcattagctggtcctgatttaggacgaactgtattaacttgacctgcatgtgtagcgatgattaatgcttcttcacgcgtgaagtactcaccccattggtcaacaaatccttgattgtctccatggacatggtcagaaactaatttgtcacggaacatatctagaacgttcgccatatcaacagaataatgacgagtgcctggaactacaattgttccaccagttttcaattcaaaacgatttgctgcacaaacgatacggcgttgaagtaatcgtccatcccaccaatcagctactttaaagcagatttctggaatttcgctatttacattacacatttgactaacttctcgttgaaagttttaataacttcacggccatggtctgcacctttcttacagtctgcaattgtccatgcttcaccgttttggtatttgtgaagagcccgggtattaatatctttcacaagattcataatcaaatcattaatttcttgttcagtcatttaaagaatcctttaattttctgccacaaacttttcttttcacgaataccaatctgacgaataacaggttcaccctgcattttctctaaccattccattgagttaacagcttccgctaatggaacaaatttagcaagggccttttggtaattatctacatccatgatatgtttaccatctgcattgtagatagcatagcattttgtgaatttcttatcaatgtatccgataaagtgtccacggaaccatacatcccaacaatcagttggcatattcagattaaggtcaaccttttctacacaacgctgaagttcattcaatactttaaacttgttcattacagttccttaatagagcggatgatggtttcaatgttttcagcagtacgggcgatatctaagtaagtattgcctgttgcagctacacggcaagacattccaaggtcagtgaagtgtttctgatgctcttcagaaatcttgtaaccgaagatgcggaaagtacctttgttgttaacttcaagactacgaataccgaaggtacgtttttccagaactgcgatatagttactgcggtaaacagtcagttctttcaaaggcaagatatcttccatctcaccgagaagtttcatcatcaggtctttgtgctcattcatatcttcagttagaggacgagctttacgagtattgcgtttcttcaaaagttcaggcttgttctcttctgcatagataactgccgctttagagatgatgtcctgtgcttcaccagtgatgattaaaccgtcaccagatttctcgatgagacctttcttaatcagaacaccgatgtttgagttaacagaacttgcgttcatggtttcttcaaggatttcacgcagttcagaagaagtgatgaaatcctttttagctacctgaaccaggatagcagcagttttttcgttcagagcatcttcggaagctttgatgatgtaagttactttagacattgtgattctccatgatgttttattcaatttgtttggtatgagactataatatcatctgctaaccagcttgtaaacaactttgtgaaaataatttggggcattctaaggagggattttggagggatatagatttatatggaaggacctggagatgacctccaggttccctagattaactgaggagcaataaaactagaccaaatacagcaattacagaacctataattaaataaaattctatcatagttcttccaggtctttcagatactcggcttcaggcgttgtcttttcccagtacttaacctcttgtgctagacgttttgcttcctgagcaagtttcttcgcttcatcatcagtgatgtgatagatgttcattgaaacgagtttttcagaatggtctttgaatagttcattctgttcaatttctttagtcaactgcttacgagttttaccttggataacgatgttacctgcaataacctctttaataaattgagcttttgcctgagcaagattaaacgcctgcttagtttcagcgattttatgctcgattcgtttggcagtgaatgtcttacggacttctacgaaatgacgaatcagctcacctgaagttttgaacttatcgttcagtttaccgttctcgtcgatgactacgatgtactgactcattttctcaatgagtttaaaatccttcatgattttagcatgacgctgctcagggtcatcgctcaaagcatagtctttacggaatttcaccttaaagccaaacccggtcttagaacagtcatcatcatatgtgatgtatcctgcatcttccaacgggtcaagtactttttcaacgtaagaagctcgttcaaacttgtatggaatttcactgatatagattgagttccgtgaagtttctttatacacgccgtgcagctcaacagaaccgtcttctgtttgaacgatttttccgttaaatttaggaaactgtacttcaggttccatcatttcgccacgaagtgctgctttagtgcattccaaaacagattcaaaactatgcggaagaatagaagttgaataacctgttgcaataccgcgaacgccattcagaagaacagtcggaattaccggaagataatacgcaggtggaacatgttctttgtctttatgcaccggagcgatttctgtgtctttgtagattttacggaagttgtcagaaatccggcagaaaatataacgacttgccgcagcagattgaaccagacgcgaaccgaagttgccttgcccatctaacagaggatagttgttattccatgtgtttgccatcaatgcaccagcatcttgagcagaggtttcaccatgatgataacctaaatcagctacaccgccagcaacagacgcaagtttgtggaatttttctttattaccacgagccaaatcaagggcacgagcaataacaaaacgctgtacaggtttaaacccatcaatcaagtttggaatagcgcggttttctacagtgtaaatcgcatactcttttgcttcattatcaatgatagatttcaaatcgcgatgacgaagatttgatgccttagccaaatcatcgatagaacctgcttgttttaatagagtgtcaaaaatatccattgtacctaccaaattagtgagccgatttgtactataacatcggaaatgaaaagcacaatataaatcattccgtaaatcattccatagtacataactaataaaaaggcggcagctattgctgccacaattaggagtttcttaatcatttgtaaactcctacaattttacaaatgcgctcaaacataataaatgctgcggtgaacgcaatacttccgattactttagtggtaggcacaaggccataccacatgaatgttcctgagcaaatcattagggccatcagaaacaagtaacccatcacaaagaagtttctcattagtatttctgcatagagaaaacgaagttatcattcagaatacgattcagttcagagtaagtctgtgcgtcgcttgaatgctgacgagtaaacgccagtgcaagttgacctttgccataaccggtggtcagcggtttcattttattggcaggaatccaaaacacaccatatgttacacagtttgaacgaagggtacgacccaactgagaacgtccagaacggatatgagaaagaacactttcaaatcctgcctttgaacgctgtttagctacaaagaaacgagcagatgcaccaatataacctgctttgccatcattgaacatcaaaaaataaaatccttcacgctcagtaatttcacgagatggagcacctgctgcccaatcaccgttacgaatagaaccgatcagttctgcaccagcgttatcgagatcagcaaaagtcataatattacgcatgttaatttcctcagttgattaaagtttattctccgatgaggggccgaagccccttctactaccaaaaatatactactgccgttacaccaccaacccaaaacacaagaagacctaaagcaagcagacgatacacgatgtgtcgtttcatttttgaccttcccatacggtttctactaaggatttaaggccatcagtttgaataatatcaatcgcattaatggcaaaataaattccgaatccgaacacggcgacaattccaagcgctaccgcaacgataaaggacagaacaacggttctcattaagttaaagcgacgatcaaaactactacgaatcattatattttcctcagatgaaagcattaatccaaacgttaactaaatcccatgcgaaaacaccaatgaaagtaacgataagacagaatactacaaaggtgttcttcaaaatcgtaagtaactttttcattttgttctccagtttagctaacaagattatagtatcactgaagaccaagaaagtaaacaactttttaaaaatttgtgatgaatacttctactgtactgcctttgccctttatctggtatgagttgaatgtgtattttttgtccaaaaaatgaacattatacttagatgcccatttctttaacatatcgttggtttttccttgatgctcaaacacattactcattccaaactttagacctttggagtggcaatcgtccagaaaatcatacagcctctgctcttctgtttcagaccaaaatttattataatctgctacagtaattaggtacggtgggtctgcatagataaaatcaccgtcattaagttcaacatctgtaaaatgcttactgctaaattcaattttatctgaattttccaagaaatgcaaaaatttctttttgctatttttattaacttcgcgtcttccaaacggtgcagtaaatcttccattggaaatgcgtatcatattgctaaagctgtaatattgaagaactaacaacaataacgggtcgtgtgatgtgttgtagtcatcgcgtagtttataataagctgcctcatgctctgggtgtttaccgagatttctttcagtaatgatattcattacatcatcccacgtgcatgatttcattttgatgtacatgtcaatgatttctttctgaatatcgttgcttaaaacaggtccagtaacattcaacgatacagatagcccaccacaaaacaggtcaacaaatcttgtgtattcgggaaaaagctgaagcaaatctttcataagtctctgcttatttcccgtgtatgaaattgctcctaacataaggttttaagtacctctttaaagtataaatttaatgattcatcaggttcagatattaacaatactaaaatattatgattaatagcaaaatcattaaatcgcgatacaacttttgaattttcggtaaatttttcttttttcttccaattatcgttgtattcaatatttggaagaaaatctgccacgattaaagaaaaagggtcggtgttatttgtaacttcaaccaaatgcggcttgtcttctaaatgtattgcaactgaatctattgcagttcctccagctatttgatgtttaatctcaataacgtggatttttcctgtttcggtattttctatagcaatatcgtatttgcgttttctgctgcttactttaaacgcagaacaaatcaaacgagaagattgaggttttacttcaataacagtctcaaactggtaatgaactacatattttgaatcagcaaagaactttttggcttcttctaaaatatattcttctgctaacttacccaaatcataattgcggcgggcaagtttagcagatactaatttttctacgatattgctcatgtttactccagttcagtttgtaaggccatagtatcatggccaatcccggaagtaaacaactttttaaaatttgtgcatgatatacccgccagctccaactcgtgaaggttttactacttccatgaggtgatcgataccgccggcaaacattggtgtgtaccgtatgacattctgggacacttcttctgcaacgaatataattatacagtctacgactttatgtttaaacatgggccctagatttattccacttccatctgggaatggaccgtctttaccagtcgtaacattaatccatggcttatgatttgctcggtcatgaacaaagtgtgttttaacttcaactctaacaccttggtagtgtggatgagctaatacgtcccatgcccattcgtatggatcgttgttattatggtcaacaacttgatcgttcacgtatccatcgagaaaatctgctaccacatactctgccggtatagcaattctgcatcgtttaagaacgtcaattctatcttgagatggatcgatatctaagctatatctagcagtatcaatgatttttacttttgcttcaccccttagcttattcaaatctagggtaaatgtccggagttggttcaatctctgcagggctttgttcatcaatgccataaattcctctgatatgtaattcaccaaaataaacacgatcgtcgtggttacatgtgtctggttccacaacaaaatcatcactaagctcaacaagttcgtcacaatgcaaccaagcatagtgaacatcaccttcatgtttaactacatgatggcaaaacaccgtagccgcatgatgagtaccacgaagattaacaactttagaatgagatacattaaatggattaatcatgtttcacccataataaaagaggagcccgaaggctccttataattagcgaagttctgaaccccaacgatcagttacatcttctaatactacgtaaccacatgtacgcattttagcatcgttgtaatcaaccgggatagatactacatcacgcggatgaactttaactgaaacaatacggtcagaaccactaccgaagtgaccgatgtaagatttagagcagacatgcagacctgcggaacaagtacgctgatcgtcttcatctacctggttacgcggcattgtaacagttttaccaggagagttatcaaacgtgtttgaagcacagtccatataagtggaacgaactactttccaaccaatgaagtggccatcatcagtgatgtcgatatcgtttgcattcaggaaatcaaacagacgataaactgcacgacgagacgggttcagcatcaggttttccaggaaaggcagataacgtttaaagtcttcaccatcttccatagctcgaacgatacgctcagtcagaccggatttcagctcgatatctttatagaataaagtaccatcttcaattcggacgttaccctgaacgaatttcttgatgccttgttccaggttaatgtggtcaatagcaccagcgatatcaccatctacaagtttctgcaatgcagatttaaatccaggatgttggctatcggcattataagtagtacggccttcagtaattgaaatgaatttggaacttgctgcccatttaaattcacgctcaaccggagcttctactttagcaggaacagctgccgccgcagctcgagcttcacgctctttaaacacacgccgaatagtgtcacgggaaacaccataattctcggcgagctctttcttagtgtacagaccgtttttgaagtttttaacgattgcatctttttggatttcagacagacaggtaacagccatttattcacctttattttcagaattttgagtagaagctccgtcaaggagctccatgatttttacgatatcatcgacgagtttgctgtcagtccgccaagtatccaagacacttgcgatgacaggataatcatctttaaactgttcaatctttttatagaagattgtctcagcatcaccagacagtttattataaattttattacataaagctaaatcatcgttttcatctttgattttactggtacggcaaaccttagcgattttgtttagttttgtcaggaacggatttttcattccagacgctgtaaacttactcgacaagaaattcaatttatcgtaatgcgcaatatttccacagatacgatttccagtagcatttgatggcatgtactggtcataatctaccttatcaatacacttgatgtattggtcgataataaatcggtcaaatgaaagcaatccatcagcttttgccgcggctttcatagcacctggacgaattgcatagaatttcttaattccgcacgcttctgccagagaacgcatgctcgcaatgttcatattccaccaccaaacattatctgggaaagtgtggatttcatcacgattacgaccgatagcataaccttcaagctcagcaatttcagatgatactaaagtctgacggtcttcttcccagtacccgtctttatcaatccaatgcagagaaacattaggagattttggacgtttctcttttggaccagtgtcataatcaggaagagcttttctctgggcttcaagttcagacacacggaatactacaacttcatcagtatccatgattttcttcaactcatcaatgacatgcaattcatcttcattgtctttgattacggtaatgtgtgcccagattggaactaacccagatttacacagagcacgaaccgtagcaatacgcttacccgctttatcgtcaataagaacgaacgctttagttctatcaacgccacaaatatcagaaatgtttacttggttatgacgatgccaagaactgcttgacactttacgacgagcaggttcatcacacgaaacataaactgatacttcgttgtctacataatatgaacgaattttatcgagattatacttcgcaactacttgtttaatatcgcggttcccaatggtaataccacggctctgaagaatagagcgttccttagaactcagcttattgaactcacgcaggaattcacggtcagattcatacgcttcaaacgctttaatatctgctgtaattacctcttcttcaagagcattcacacgcttctggatattggcaattgtttcttcatcaagagaaagctcttcacgagatggagtaatgtctaattcgccaagagggaaatgaacataaaccttaccatagcgattaagcaaccaatctgccttaacatctacaccgctgatcggatatacgatttttccataaactgcgtacagaccataactttcatacgaactattaacgctgaaccagtcagtcttatctacagggaaatattcaatttcacggcgaagagaatctacctttggaggtacagcaccaaaggtacgcaaaatatatgcgatttcataatgccaagtatcaatatcttctactttaaccggaactgtaatttcaagaccagtttcttcgtcttctttcatatcatcaacgaacattggacgaatagtaggttcacctcggtttttcatgacagtataaccggtggctttaccattatgatatgatactacgttaaatgtactcgtgtagctcagtggagatttagaaccaagaccaagagcaccgatgaaatcattactgttattctttgtggattcaaagaacgttttatacatcgtcatcatgtcattatgattaagacctgggccataatcacgaattacaaatcgtgggtcaagacgagtaggagccttgatataaaatggacgattttcattaccgttcagtttatgagcatcatcgcagttagtagaaagttcacgaacaacagcacgaactttatacttatagagtttatttgacagaatgtcaaaagctttacctgaagctttaatggtaaacgttgaatcgtcagcgtcagaagaaccaataattacttcatcatcacatttaattttcattttattcctatcaattatgtcgtttaatgatttctgctacttcaagtaactcttcagcagtagcggtgttagttgtaaaaattttattatggatttctttgaagcgttctttgaattcctcagctgcttggatgtcaaagaaccgctggatgatacgatattcacgatatatagcatcgttgaataattcttctgatgggatgtaactacgtttcataatattttcctcagtgatttaggggaaattatatcactataactttaagcaagaatcctagaatcatctccaagcacttcttgattaaagccatataaatccattcttataaagaaaaagggacccggaggtcccttagattaccacaccctactaactcgaccataaacctcatgtttagaaccatcaatgttttccacccagatagtaacacaagttccgggcagaggtttcttttcagcgaacagatatccatagtcgcctgagatcaaagtaatccaataacgttgcatgttaattccttctaagtaagggcaatagtacccttactatttattctttattcactcatccatgtcttacgtggagaagcatcgttacccatgattaattcaaacagttctttccagttttcaggaagagtgactacatcataaaccgggtcttgaataacacgttcgtattcatcttcttcaagagagccaagacctttaatataacgaagtttccaacctttgaaatcatctttatggtcttcatattcaccaagagaatagaaccaacgttgttctttacctttggtgagaataataaccggagttttcacaaagcggattctaccttgttcaaacagttcaggccaattactgaaaaacgctaaaagacttgggaaaattgaaccaacaccatcaacatccgcatcggtcatgatagcaatatttcggtagttagtattttcagcaggctcaccaatcgtcaaaccagtgattgcacaaatgtcaaatacttccttgttcttcatagcatctgcagcagacattccccatgtattcatgaatttaccacgtagaggatatccaccatgaagttcacggtcacgtgttgtgagcagataaccaatcgcagaatcaccctcggttaagaataaagtggtgtcagcatctttgccatatttgtttgccttgatgtgcttagctactttagctttctgcgctttcttggcggctttagtttctgcagctttctctgcagcaagtttacgagctaacattgcctcgataataggcatatgaatatcttcggatttcataatagcgttagcaagtttcttgtaatcaatatcaatatggctacgaatttctccccaaggagaagtcaaacgctctttagtctgagaatcaaatcgcatgttagacatatcacgaataaacatgataacagtcaagcattctttaattcgtgctttgttaacttctagtttgtacttacgttttaatgctggaataagttcattgctcagttcatcaagaactaggtcaacgtgagtaccaccatttttggtgtgaatgttattaacatatgaaagttgacggaacccatcatctgagcgaccaatagcaatagcacaagtatcagaatcctgcactactgcattttcatcatacatctgggcgtaagctttaaacttaccttgaacccgtttacccatgaatttaaattcaatatcaggataaactactgctaacgtcatcagacgatcgtggatgattgactggtcaacatcagtcagtcctgtactttcaaagtgactaaaatctggaatgaatgatactacagtaccagtcttatctttgatgaattctttatcttttgctgggtgttcttcccaggagatattttctgcgccattagaacaacgaacaatgatttcatttttaccatcgcatgttgcaccagtgaaagatactgaaaagatattagttaacgcagaaccgacaccattcataccaccagttttacgctcagcatcatcaccaaagttaccacccgcacgaggacgagtccatgcagctactggtcctggaatagtttctccttcaggtgttactacaggagcctgcggaagaccacgaccgttatctgttacaataattttgttgcctttaatgtcaactgaaatcttattcgcgtgtttgaaattagtacgaatagcttcatcaacagagttatcaatgatttcatcaataagtttgataataccaggaacatactttactgattggaatttaccaaaaagaaaacggtcatgcgcttcaaacgcagaactaccgatgtacatcccgctacgcttaatgatatgttctcggtcactcagaattttaatttcgttcttaatcattacatttcctcggttagtgaaggaattatatcaactattaattatagcaagtaattcttctttgatatacatcaatttaccaagaacctcatggcctcctttaaccgctttatactcgggatatcgtggccgctgtcgttcaaacatagtccattgagcatcactaacgttagcgtatgcatatcgagttccgtagtactgttcaatccggtactcgttgttttcattaagtgaaatccactcttcacagacttcataatatttctgcatccaaatagtacgaccattcacgtcattgattggccaccaagcaaacctatattttccaatagcccgctctactatttttaaatgtcgtttagcacgcctttgcgcagttgtcattccaataatcataatattctcctctggccaacaagactataataccaaaacacgatgtccatgtaaacagctaaatgacccgaaggtcatttattcataacgaattgtgctgttcttgagaaaaagccctgagcacactgttccgttaacgggtttccctgttggcccaatagccgtaaagcctgtgtgctgaaaatcatcctctgagcaagaaaagaacttatatccagtgattttgatatcagtaaatcccgcgttatctaacacgcgagttgcgttatcagcgtcagtacatccaactatcatgaaggcaagcgctgcaattagaatctttttcattttaattttaatttaaccctataagttatattacctactttaataacccggatttctccgggtttcatggtaatgcgtgctttagttcccatcaataatcaccgctctttaatccatcatagtgaactgccggagcagaaaccactcgcttcatttggccttcacacttagggttaaagcagttaacagtgtagtcacgatgggaaattttacgcataatttctatcttttttccacagacttcacacttgtaatcatacattggcattaacagcatccttccatttttgtgttttgaccatgatttgctcattcagtgcacgagtaaccatcatggagatttcatcatctaatacatgcgcatcatctttatgacgatttctgaaatgaagccaaagtgcatctactacacagttaataacatctgcgcactcgccttcaaattcttctttctgccgccatggacgattaatccaatcacacatttctccagtttctgaagaaagttgcagcatgacattcccaatgctacggttaggaataggataagacagttttgatgcttcaaaaataggagctaaatttaacattgatatgcactctgcagtgctgcaatagcagcgattgcttgaccacggttatgaatagaaagattcataaccaaatcggttggaattacattcgcggaagttccaacttcagtaaagtatttgaattcgctatcaaaaattacaaggtcttcaccgccgacttcatcacattctgtgccattagcccacgtaattccggatactctgttattttggtggtcaactttagtaacagtaaaactcccgccattttcatagagttcatacacaaagtcttcattaacctcatagcgtgaagaaaattcttcttcagcttcatcattgacgaatttgtactgtacgccttctttaaaattcattacacaatctccatgtattctgggccatcaactgtaattacacgagcaaaggtacgaactgggacaatatcaccatggttcgcgaatacatacaaccaggtccaatgctcttctttaccgaaggttttctctttctgaacgacaattaagtcaggattgaacagaatgtcttcaaaagcttcggcagtaatttttacggtgttttcagttttcatgttattctcctcagtagttgataagataatagtaccacatccttgtggtaaagtaaacaacttttatactaaaccttgacgctgtgattctgtcggctctacatcagctttaggcaaaactgcatagttgccttgaaacactacgtttactagggttttaccgtcttcttcccactcatcagtgacaagaacatttttgccttgatttagattttttgccggatttttggggtctttggattgagtgacaacatttttaagggttttaacacgaacccacttacgttcaaagctttctttaacattgttagtgtctttaaacttcaaatgttttgcaggaactacaaatttttctaagcaatgaatataatcaccataatcagaatgaattttataacctgctttaccatcattacgattagcaactttaacgatcacaccagtatgaccaacccacttgccaccagtaacttctacagcatcgcctacaatcaaatttttcatcgtgtttctctcagtttgttaatgtagagccattatataacggctctttcataaagtaaatagctatcggtgagaaatttcacatccaacatcgacgccgaacagatacccagcttcccaccctttagccatcatagccttggccaccagaaccatcgttggagagatttccgggaggatttcccggttgaaccactcttcaaagttttcatcgaactcaaactcttccattagccacgccccttaggtaaactcagtggatcggtatcttctgggcttggtgcttcgcttaggcctagagcataacgttgagcatatttaagcattaaaatatccttagcgcagtcatggatactatcatgcgcgataaacccgtcgagcgtaccctttggaagaggggtggttgtcagaccacgagtcagaagcagcgattcaattgcagtacgaatatcacgttgattccagaacttgcatggttcttctttaaatgtatcaatttcttcttcggaaattccttgggctcgttgaacatcgcgaagacaatcaacaaaaattggaaagtcaaagctctgcccacgacaccagccaaaggaatcccatgggtgaattccattatcaatcagatattgctgggcttctttaattccagcaattactgataaatcgtctggcgttgaggccaggttagcccgggcctcagctgattgtttcttccaccactcaagagtagacttaccaaacaaccgatgacctttctgggatttaaggtcaaacttgatacgatgaccacgtttaaccaattcatcgaagctttccaaaacttcggggtcagaatcaaaggtgattagagcaaggtcaatcacagaagagcttgacacatttccgaatgtttcaaaatcaataataaagtctttagccattttgagcctctagcataaatttaatttcgcgtaactggcaagcaatatattcgctcagatacacctttgggtcatatcctgtgaaccaagtaatagcattagcattatctgctatatcacgaagctcattcagaactgtatcaattttaatgttaatagcacgcttaacattgtctggtgcttcaaacttagattcttgtaagccaacaatcattgtttgaaggtcttctaatttcaattcaaacatattacctcacacataaaatacatcataacgaccacgagtagtaccaacatataataactgttgcgcgagagaagcatctgccatatgaatgcatggagtataaatgaagcttctgtcaattgaaataccctgggccttgtggaaagtcgaagccggtaatgctttcactttatgaaacttacgcttagcatcccagaactcagaccagggtgctttaccgcctttattccagttcttatatgtatctgcagtttttgccaaaaagaattgaaacttattcatttcttcttcggatgagatgacacagattttctctctagcgtactcttcatcgtcgccataggtttcaatatctaatacccaatgacggaccagatattcacctggaacacctctggcacccaaaaacgtggtggtttcaattgcatctaatatgcgaacaaactgaccattattgaaaagaatttcgctgaatttctttccttcaaatttaagttccttggtaagaggttcttgcataacaacaatctcacctacgacaaacggctgatcagtttcatagattctgcgccggattatttcattcagtttatcaacagatttattcgtgaatgcaagcattctgttttcaaataaatcttctggagatttcactaaactaaaataatttagcataaaatctttaagggcagttcctttagtaaaaccacggacaccatgaccatcaactacacagtcacgaatccatccaccatttctgatttcagtagcaacttcaatgattggagcattactccgcatcacctcggtcaaatgaagttgtaagaaatctttatgagtgaagaatggactcagtgcaggttcattacttccaggttctaccggacgtatctgagccttatcgccaatggcaatgacaatacaccaggcaggaatagttgccatcaaaatcttaaacagtttacggtcatacattgaagcttcatcacagataagaactcgaatagatgccatatccggaactttcttttgttcaaacagaacgttttcttcatatgtcgtcgggttaattttcagaagactatgaatagtactggcctgcattccgctgagcttagataaaacctttttggccccatgcgtaggtgctgccaacgcaatgccagagataccctgagaaatcaaagcgtcaatgataaatttggttaaagttgttttacctgtaccggcaggtccattaatcgtaatatgttgacctttagctccttgtttgaccatttcaatgactttattaaaaatcgctttttgactttcttttaattggtcaaacgtaatcatgccacttttaccctcactacatgtagatttttaatttttgctttgagtttttcacgctcaacatcgctaagtggttcatacactagctcagttgttttccaccaaagcatccctttggttttgcttttcccagtaaaattcccctttgccaatttgtctgttaaaaccgacattgtacgaatccgtgctttattagccgattcttcattagtgaagactacacatcgttctccatcatacatatcagttgtgactggatggtcaaatccgtctttatccttatacgctactacatatccatagtgttgcattacattttacctctcaaaagttggaagaaggacgcagtcaatggaagaccttttttcaattttaacttatctaacattgagcatttttctaaccgacgaagtgagttaacaattaaccgtattgattgtacacggatttcagcatctgacggacgattcggaactgatgctaaaatagcagataacttacgctcaactttagctaattcagacttaccaccgctgatacgagttctcaatgcattaataagttctaaatctgccgaggttgcagttccattcttttctttttgcacaaattgagaaagatgattttcgcgattacgtaagttagttttaattgatgtgatagttttttcatactcacgaatcttttccaaacgagaagcttctttatcacttgttggcttaacagaatctgaagaacgaactatgcgtgctgcgatttcattcgcttttcgctcaaggccttcaatcgtattatttccacgtaaggtattatacttttgcttaacaggaataacattccccattacatatcccaagtcattattccagcgttcaagcgtcatgctgtcaggatggtttcctttgacggttccaaacttttcacctgagtatgcgcaatgagtctgttgcatgatgttaaacagatactcaggggtaagattgaactccttgttccgacgctgggcagaacccaaagttgtaatcaggcgagtataaatcttagcggtttcagcagtgaatttcattatattttcctcaaaaatgctttcgtcttacggacggtataatgggtctaggtccctagttctagataatcactagttgactaagctatagtaacactaaagtagtccataagtaaaccagatttttcaactttgttatgacccaccactttgaacttagttcccatcggtagcatcctttcttgttctttatcaatcatctcgatgtcagcgcttctgcgctgagcaatgttatcaatcacatcatttggtcgcatgaattcagaatctggtgcagtaattaaaagcgatttcatgttggtatgataatcaaatgattgctgacaattattgacttcaatgactacaaaggtcgagtaatgccatttgcctgcaaactctcgggcgatcgtttcatctgttgtgaatgacgccacctttccaaagtcaaattgctctcctttaataagagcttcataaaaggctttagcctcacggcatgatagacctctatagagagtgtctctgttatcaatttgatgacgcctaacgatagagtcaagtttcttatgaaattcttcgccaatcttattgttcatgcactgccacagaattgactgttctttgcagtcaaaacgattggctaatgcttcccatacgcttaaatcatataaaggtaatcctttgctttctcgcgcgaagttaagaacatcaatggaacgaatgggttcttcgataggaataacctttgataattttactgaaatagatgggtttaatgaaatagccatgatattctccattttggttacgagaggtatcatatcatggcgttttagaagagtaaactactttgtgaaattattttgcccacggagaccagggcggcgggtcagaccagattgaagctagttcatctagaagagcttctggggctttaataccatacttctgtataattatacggtattcgtctttgatgtccttagaaatcactggatgaacctgaacctcttcctgaggctcttccatcatttcaaacaaatccatcacatgaaccactcagtattgcgatacagacaaccactgttgttatatccatcagccgctttttgcaacagcgggcttggagaaagtttgataaaatctgcgcccatatataaccaaactaacttagtgaattctattagagaatctgtgctatcaatgataatctttttgcctcttgaaattatgtcattttcgtattcatataagctagtttcatgacatacattggtgtatcctttcaagtggagagcatgtagtatagcaacaggacttcctggaactgtatctacgtcaaagacatgggcagtcttaataattccataatcttcagaaggacgccaaccaaacgcctcgaatttattaactaagtctttgaaatctttgtcgaacgtactgtatagagcaacagtaaaaattctatcttggtctagacgcaaaactccatttgcatcacttcttgattgaacattacgttgtaagcttactttatagatttttgcgttgaacacacatagctccttcagtcatgttgttgtcttcaaaccacttatcatttgctttaattaaagcaggcgcagcttttagtaataacgctgcagctcttacacctctgtaccaacaatcaaaatgagacttctttaatggcgattgataccagggcttagtataacatatcattttcttctcctcagttagtaggaataatatactattcccagtatagcataaaaggactcccggaggagtccttaatttttatgcttctgcactagcttcaaacattttcgcgttggtggttgcccaagttgcagcatcatcaactactgttgaataagcagctttttcagatgggaaaatctgatactgcgcattagcaatacggtgcgaatcagaatataccttaaaagctacagatacttcagtacctttaatttcgccatcagcagtggtatggtcaaaagttttgatatttacgtaagccattttaatctcctattagtttacaggagtatttatatcttcctttctgaacagatatattaaattttttagggctgaactagtgacatcatattttccctttaacgctttaactactggtccggtagtaggttttcctagtgaaatccagatgttatatatttctgttttaagaggttcatgccaatgtggagctattctttgcgcacgtgaagtaccttctgaaacctttttatttcctccatttgcataaaattctttcataacttcagattgtcttgcttttcggtcttctttattttgcgctattttctgggcttctctcattctctgtttagtttctggattattaagacgaagtttatgttccattcgttgtcgttcagtccattttataccttctcctccaggtcctcctggagaaatgttaatgcatgtatttggatgtttatttttaaccgcggcaattaaatctcgttctacatcataggatttttttcttgtgccatggcatttagaccattttattttataattaaacccatatttacgataaatgttccataaaatttttcctgaacctgggtatttatcttcatatggatttacgtgatacgattcatgtttacctgcgtaccaaaagacgcctttcggcgtcttaacttttaccagatatgtcctataaaatttttgtttaatatccattgttctgacgttcaaaattttcggcatttttcagataatataatttaaagatttcttctgcatccatacctaagccagcaaacatgtttaaaacgaaatgaagaatgtcaatcatttcaaacttaatttcaagttggtctttatcagacatatccgaaatacgtttttcttgtgcttctgtatagcgtgctttccattttttccagacagcggacgcgtctttttcaccgcgtgacatttcgccaagtgaagtcaataattcacggaattcatcatcaatacaatctttttgctcacgcatccaagcaacaacatcaccagcggtttctaatttatctggatgataacaatattcacggtcatttgcaagacgaacctgaagagatttttgcatatcaagcattacttgcagagggtcaccaccaactttgcgtacgatacctgcgtatcgagcttcagctttatctgcaccagcgatcagttgactacattcgttaaagtgtgccattattttattcctttcaattaaattagataaatattatatcacttaacataaatagcaggaggattcatgtctgaagtgaaacaagaatgtaaagacaaaggaggatttggaagatatctttacgtcggaatcgccactgctgctttagctgcatggaattatgttgtagttccattagctagcgcacacgggctagttcttcctccaatgccgttagaaaaagttgtgtcgtttattatgactggaggattgctttaatttaaggggctttggcccctatatcttcgcatatttgtcaagacgcaatttagccattaaaccctgcgatatattttgattaatataatctgttatttcagaagcagttgccccctctttcataatcatatcatttatatctttgcttttccaaggcgacttatcccagaaaactaccttttcgccagcatctactaaacgtttcatacgcttaatcgtatcaggatgacgaggttcatggtccataatccatgctcggttatcatgacatggaacttgagctaaatctaaagacccaccggtaattgcaatagcattatcaatgaacaacgaatctattggtccttccatgacgaatacgagttttgactcatcaatcgtgtcgagaccataaattttggtcgcgtgttcatgggctttgattgtgatgtatttttgtggagcattttttcgtagtgctcgtccttgaaacgactcaatctctcctttcttgttgaagataggaataaccaaacgtggttcgttcgtctcattcttataggttcctggattaacggagttaacaagagaaggccattggttagtaaaccataaccttttccaagaagtgcttggaatacatctggcagtcacgtatttaactatcggatgttccttaggaagtctatctaatcgctcacagaaattaagtttttctattactgggagttttgcattaattttctcagacggttctacagcctttggcttatcaaagacttgctcctttcttttctcaagaagatactctcgatagagatcgggttcattatctttaagatattgtgatagccacttgttatactcacagttgaagcaatgacagcgtaatccttgacctgcatcaaaaatccagaatcgggctttattgatatctttctgtgagtcaccacaaattgggcaacggcagtttaacttaaatgttgaagatgtagtaacgtgtctaaatttaggtaggtgagatattgcgcggatagcgaattcgttatcaacccatgacatattatattcctctggccttaaactaataaggccattgtatcacgtttcaggttttgatttatctcgctttttctttgggagagtttctgggcctttatttactactgcgcccgaagtagtgcctgatgcaatgttctgaggattaccgccggcatcgccagcaaccatttcctcattaagtttaacaaactctttaaatgttttcatagagcctccaaactatttattatttccaccatcaatacgaatacacttgtatgtagtgtagactgatggtgaaccgaacccggaataggctttgatgctagtaaattgttttcccgcatcttcacatttctgagccagcgaagactcgttcattcctgtgaatgataacttttcagtagaaacaccgccggcaccagtcattatagccattactaatacgtatgtaatcatccgagaatccagcttgcaattgtgaagttatcaaaattagcatcgcagtacagagcatagttcagtttaattgctgcgccatcattggagatttctgcctgaacttctttcatcttgcttgggtcagtgttatcaatgatatgacctacatcagcacgaatctgctcagcaacatctttttcatctgcagtcattgaccattcgcagaggtctttgtcatagttcgccagagcgggaacaacagagcaacttgatactgcgaagattaaagcaagtacaatctttttcattttgttttcctcagtttgtttcagtaaggctatagtaacatggccaaacttaaaagtaaactatcttttgaataatttttcgaggacttcgtcggatgtcaaattcttggttggaaggtatatcgcagagttaacccagataccttcgtcattatatgccttaacttcaccatagtcatatgaagataaatctgctttgttgtaagctatgactccacgatggacgctatcagacgccgtcaccacaaaggagcgacctgattggtcgcgaattacgctaaacacaaaaatcataaaatttaccttagaattttaattcttctgctagagcatcaagcttagaacgtgatactcgttcctgacgattagattcggctacacggttctgtgcaccggcaccttctcggacggtattgcttggattaggcttagttgggtcgttttgctgctcaatttctacccaacgttgattagccttatgtacacccatagagaacttattgttgatgttcttatcaccgtaccgtgatttaatctgcttaattaattgttgcttcatctgagcaagttcaggggtttcaatcacagccagcataaagtctgccgtagcaggtagacccgcagattctgcaatatcactcatgtccatatcagaagcatcccaagccgaacgaccgacctgagccgcggtccaaagaacagtttcagattctacagccaatgcgcgaagttcttctgcgatagctttaactaacgtgtaactgttttcagtatattgacgaatacgacaagaagcacaaataccaagatagtcaatgatgataacagtcggtttaaagttcttcttgagtttcaattcatttagaagagctcggaatgtattagcgttagcaccgccagtcggatactgtttaatgattaaacgaccaagagtactagaactacgccatttttccattttgcctttatattcggcgtatgatacacaaccatcgtcaatatcatcaagtgatacatcgagcaaattagcatcaatacgtttagcacaaacttcttcggccatttccatggaaatataaaggacgttatgccccatctgaagatagtctgcagccaatgaacacaatcctaacgatttaccaacgttgacgccagccatcaatacgtttagtgtaccagtctcggcaccacctttagtaattttgttcagaatgctaagtttaaacggaactttacgagctttattctggtatgataaccaacgagcttcataatcttccatccaatcatgaccaatatagctatcaaacgatactgataacgcttcacgcatgatatcaggaatagcccccatatcaggaagacgcttatctcgcttatttggctcaagctgggcattagcctgaatttcaataattcgagacgtagcgttatacatagccttttcttgaacgtacttttcagtttccttaactaaccaattcaaatcttcgggagcatcagataacttatcaataagtttctttgcgccttcatgttccgtttcagttatagacgaattatccagtgctacacacaacgcagtctttgaaggaattgctgtatattcattaacgtgtttcttaattatgttaaacaccgtctgagcaggtccttgctcgaagtactctttgtccatatatggccaaaccttcgtaaagaaagcctggttgtaaatcagattagctaagattgtttctaccactttaacctcttaaaagattttccataatgattttttcttggtctttaatgcactctggatttgttgtttaacacaagcttccacatgaggataaagttcatccttatgagcttcagacggagtactaaactcaatagttacttccccggaaggggaaatattcaatttatgaacataaaccaagtgtgattgaccatttaattttatcacaatttcttggataacagtcttcatagcttcttggattatttcatggcttttcttgaacactcgttcttgacgctcgaagtctccctcttccgagggagattcttgttcaaatttctcgagttcagattctaaatcaaactcagtcttcattcatgaagttctctaattcatcttcaacttcagcagctgatactgaaccactctcagggagtttaacaccatcaaccttagttgaaacttttgagttaatcatttctgctaccgcttcatcaaccgcagcgtttgaatcaatagcacccaactgataacgagctttgatagcgtcacggaatggctcatgcttaaacagaggaccccaaaattccgtactgctcgtatcttttgcccgccaggatttttcttcacgaatcatctcaccagtttcaacgtccaggaattctcgtgcgtaccatccatttttcggtttaacaacaaatccgatatccagagccatatcaagcagaccactgtacggatcgataccaccatcgaatttaacatcaatgaagaacttacttttctctttgacagtacgtgatttctcggcgttcaggacaaactgatacccctcaagctcagtaccatctttaatttggcgtttaccgatgatgaacacagtatccgcagaatacataggacctgtgttatgagtaacgataccattttctaatacataatgctctacacccgcaacagacaaatcataaacttcttttttacccacagctttaacagatttaattttcatagtttaccttgaatttcatacgaccaaccttcaacaccatttctgatgtttttgattattgtatttttgttaattcctaattctcgcgaagccggtcgaacgcctctatacttgacaccatttattataacacccttttgacgaggatgagaattagctaaacgttttgatgctttttctgcaatagtgttaagagttttttcagagtgtttacgcccataaaatccgttattttcgccagaaatacccctagatatagcagctttatgatctttagaaagctttttatcttttgttactccaacatactcgccacttaaaactgcttcatgattaataggcaaacgaatacattttccggttacacagtgtttgtatgttccataatttgatttagcgtatgaattatgaccgcatgcataatctaaattaaaataatttggattagtctttgctctacactcatattgatatctgctctctattgacaataaatcttcatgagaaatattttcatattcttcaagtatttcaattgtagtattttcgtcaataaatgaatgatagtcaggatatcttgaagaaccaaaatactccttaccattttcttcaatgattttaccattaatatgtttggctttagttttactaccaatgtaataaaatggcggagtattttgtttaatacgggaattaaaaataactttatagatatagttcatatggataccttgagtacattagttcggtatccatatttatcacctaattacacaatccattccagctactaagtctttggcttcaacccatacaggaatatcttttgtcataacaaggaatttatgcgtatctgaagtagtaactttatatccatcttcaaattcaatttcaaaacattcgggagtgccttcagctagagtttcggggtcccaaacataagttacttcattatcaccaaccatggttttaactcgttcacctggcttaatatcttctacttttttagtagtgccatcagccatttgaattttagtacctgcaacaacgcaaccaccagtcattaccgtcttactgaacatctcgatagtctcgattgtgtggttaaccgcaacgcaaggaatgttcttaatagagaagtaaggagttacgatacggaagagagacttcagacttttcgcacgagtcatatctgcgacagatttctcgttcagtgcatcttcggtttcctttttagacgccatgttaccaatagagtcgataaacacgatgactttttcaccacgctcaatagcttcaagctggttaaccatatcgatttttaattgttcaaccgactgaaccggtgtatgaattacacggtcagggtcaacacccatagatttcagataagctggcgtgataccaaattctgaatcatagaacaaacagactgcatcaggatacttattaagataagcactaaccattgtcagagacatgttagatttgaagtgtttagatggacctgcgaagatagtcaacccggactgcataccaccatccaacgctccactgattgcgatattaagcatcggaattttagttctaactacatctttctcgttaaagaattttgatttagtcagttctgctgtcattttagaagtggatgctttaatcaggcgagattttaagtcagacattcattatattccataagtctccattatatttttctcacaggttaaaggatagagtaattatattactttgttcttgaagctattaacagaagttccatttcttcttggtgttataaaccactgtttccatatctatttcatagtgtattttacatccaacgcacatgccatgccaccagcaatgcattccatctgagccagtagttccttcatgaacaaactcatcagatttacatacgaagcatctgaattcttcagccttgaatatattaccagctacatcagatttatcatagatgttcataagaggtccttggagggctttcgccctcacagatatggttctaccttaccaaattcatggaaggcctgggatttcactcgagtgttaatacacatacgaattgattttagtggttcgtcatcaccgaataaaccacgcctttcaccgtctttagatttccagcgagcttgatttgggaaagcagcatgtagctgttcaagggctctattctgacgagcagtatcacgctgagtagagcaaccgccaggagactgcactttgccggatttaacgaggtacttaaacagagccagatgaggatgacccatgttaattaattttagaaaagcataagcatcttcgttaaggtcaataactccgtaaccaatatcttctgcggtaagtttagtcaaatcgtagaaagtattggtaaacccaaagctgttctcgcgataatgaccccagcttgatgtgattttgaaaatcggcaagcgagcatgaccgtgataataaccacaatccatagcagtctcgacatatttgaccatatcatcaaatacttcttggctcattgcctcgccgacaccaagcggaacacggcgatcgtcgcgttcacgaatttcagtcagatgaattgtcgtatcatcatcaagcatccaaattcgctgccctgcatacatttcagtaatcagacggcgagtaccagcgattccatcaacatcatcgggaatagtaacaattttagcagcatgaccatgccaggtttcgtatgcttctttttctgattcacgtactacaagatgtggaacataaccttcaggaaacatagtcagggcagttactgccccggcacgcttataacttggaattacaaactgaatcatttccattcacctttatagtctttctttgcgatatgagtttcacctgtataagcatagttatctacgagatagaaatggcgctcatacacgtgcaaagacccgacgttccaaataatatcgccaaccgaatagtttttacctgatgcattcagaagtttggttaactgttccagaacatagagctgccacgcatagtcattacgatatccaaagacgacatcattagagcgcatgtttacaacagcatgaactttattatcacgaatcagatactgaacattgttagtacacatgaaatcactcatgccatcgcgctcaaaatcatactgcatttgaggccgtgtataaatcataattccgcggcgagaatcaggattactgataagttcttttgcgcagttagcaaactgtgaatagttttgtgttgaccaaactgcccagccatagttagaattaatctcaccatgtttggatgcaattgctttccaaatagctggagtttcaccaggaatatctttaacgaataaactttgagatttataccactcaagttcacgggcaatgtacccatcattaactgcaccaaaaatcaggttttcatctgcaataaatgatgcacctacgatttcaatagtcttcacacccgtcttatcaatcacaaattctttgttgagcaaagcatcagcgaattcttggcggatatcttgtactgtcattggagttacaatcatgagacctcttatttaacttgctggataataattgtattctgttgtgcgttagaagcagaccaaatcagcgcaattaaccaaccgataatggaccaaccgaatactagatttgtgataaagattccaccccgtgatttatgcttacggctgcaagctacaaaagtcggcagaaaatagataaagataagaatgattaagccaaatactgcttccattttaatttcctcagttagacatgcatttgttgtagatgtggttttggagagattttaactgctccatacgttgtttatgctcattataacttaatccgccattagcaaaatcagttaaacgaatctgatcattcaccgctgcagctttagcagtgcacgtacgttctttttgggttttacgcaggcgcttgatttcttccagttcatgcttattctgctcaatcatgtcgagttccatggcagatagctgacgattatgattagctttttctttcgccaaacgacgctctaccgcgagcgattcagcagagacctggttgctagcacgatagtatcctaccgtaccgccaattgctcgcacctgtccaacagaagaagcagggacaatatcaccttgtggcatttgacaaccagtcagcgtgagagcaacgataacagcaagtaacgatttcattgtaatctcctcagtatgttatttcgagaaccatggtaccacatccttgtggtaaagtaaacaaccttttaaaagtcaaacatatcaagaagagacgatttctcttcgtagtctaaccctgccgcttcagacatacccgtcagaggtttaacgaacgatttttggaacagaacactgtggtcaagccacactagaacttcctgtcggatttcttgtggcagctcagtgcccgatggccatgccatgcatttctcaccgtacgggttaccttcacgcagcgggatgaccatcaccttctcgccttccatgattggtgttataccttcaaatcctgcggttgctcggttatatgccaaagcacctttaacgtgatatggtgtacctttatctggatatcctgcaccgtcatcatacttaccgatgttgttggcagtcttaacctctgcgattactttatagtcaagctcacgatactcagactcaaactgcttataatattgctgtaaagattcttcaccttcttgcagcatacgacgaatagattcttccaatgcgttttgaacagcagttggtgtagaactttgctgagtttccatacccatgattttcagatgcggttctgcataacgggtaccttccatatcatacacgttcagagcatatcgtttcttcgctttccaaaatccaccaatgccgtttgaacccaacggaggacaagaaatagcttcacggtccatgaacattaaatgttctttgttgttcatgtattcacacatctcacgatatgattggtcaatccaaggttccattttcttcttaccgaattggttcaggaattctaccaaatcgttagtttctttgaaacgctcaagacctaccttctcgataaccttatcaacacaaacgtaaattgagtcagtatcaccggctactacaaacgaatgtccttcagtaccgcataccttgttgaggtattcattaactttacgttcaatccattggattgccatttgaccaaacaatgtgattgctgatgcgttacgtaaatcataataacggaagtaaatgttacccaatgcaccataaagggagttgatcagaatcttacggtttaactggttagtgttacccaagatttcagcatgtttacattcaaacatcagtttgtcaagacactcttcggtatatgtcagcagttctgctttcatgtcatcagagaaatcttcatagacattaacttctgtgaatttatcgatagttccaaacttcttatcattcagaacctttttaatcagttcttgatttcgtttggcacccatcattttatttttccactctttacgctgataaaataccttcgcgatttcaactggaatgacaccatctacatctttacgatacatccaaccatttggtgaacatgaatattcatcagacggacgaggagcagtcttgttaatgtactcacccaacggatgaagtttaaattgtccaacgatggtttctggtgaaatattgacctgtcggataattgacggatacagagatgtcaagtcaaacgacatgatataacgatatgcagcaggaactggttccttaacatacgcaccaggatatgactgtttaacatgagaacgactttgcggaataaccttgtcttgttctttcagactgttaaagatgattgcgtcccatgttttaattggactcattacaccttgatatggcatcttcgcataataagacatcgagatagccaggtcaataaatccgcgaacagcatcaatcgcttgtactgattcaacgtcgatgatgttatacgaaatataccgttggtggttagtttcacgcaatttattgatcggaccgtcatatgctaatttacctttcttggtttcataataagcaatgaaatccaacttatacgtcggttggttcgtgaaactaaacttcttatacaaatccatgtaatcaagaatagtcacacccatgatagaataaatttctttatcaccatacatgtttgttataatcttagatgaaactttattcagaggagagaaccgtttcatcgtacgctcaccaagaatctgtttcacacgattcatgatgtacggaatatcaaatccttcaatgttccatccagtaaagattgctgggcatttctgttcccaaagattgatgtactcaagcatcatttctttttctgaattgaacggcatatacaccacgcgatcaagaatatgttgcggaacttcatcaccaccctcagaatctaaacgagcagcgagtttcttgtcccactcggaaacagaaccataaagcgaatgcagtaaatcaaatacgtagaacttatcatcaactgaatcatagtgagtgatagcatcaatttcatattctgctttcatcgggtctgggaattgggatgccgtaacctcgatgtcacagtttgcgattcggatgaattttttattataaacgatttctgaaccgtaagtatcactgatatacgcgagtttgaaatcatccatacccattgcttccattcccatgtcttccatacgacgcatccaatcacgggcatctttcatagttgggaatgtgttcttcttgcaatacttgccatagatatctttgtacttcgtttcttccatgcaatggctaaacatcacaggagaatatggaatacgacgcattcgttcttcgccagtagaatcgatataacgctctacaatgtcattgcctagagtttcaacgctaatataaaattctttcatgggtttcctttgtttatagaccgagttattagtctttaggtgggataattatactccaatttttataaagtaaaaggcccgaaggcctttatttttcatctttaaaatttcttatcattgacgcataatctacatctggatatccaatattataaacttcttttctgaaagcctttctacctgggcaatttagccatttccatatatcaaaaagctcatcataataattccaatgcggatacttccgttgcgagattttctgcccttttgacattttaagtttggtttctttagatacagtgtgtccaatttttgctaaacttaaatttttacgatgtgattttgtaaaaatttttattttcccagattcactcattttctttctagtttcaagtgaaacgaaagatttagaatgcttaatagcttgtacatgagtaatagaaagttttctaccagaaagagaatcacttattttatttttatgtaaatcggaaagttttcgttctttcatagcgttgctaaattttaatttagcactttgatatccgtgcgaagatacatatctattggtattatttccattgcacattttccaaaacgcgaatatcattttattactatcataaaccttagttaataaccaatgagcaatgaaatgctctctagctgttaatttaactaaatttgattttaaatcagttcctcctaaagattttggaataacatgatgtatttctgtatatccagataaatttgagcgggtttttgcccgctcaataagttgaaaatagatttttctataattcaattaacaccctatcgtatatttggatttaagagtccattcattcttgcttttgaatgaaataactctaaaattattctgcatttcatgtagagtttgccctctattgatgataagcaatccccactgttccagtaattgggcaatagaatcacggcgagcaatgtcttctaaatcaattgttactggacgtccatcaagtttaagcatctctttgaagtggacaatatagtatcgtccttgtttctgaagaatatgacatgattgataaatatatttatctttgttattagcaattcccatacgggtcagagtttctttaactttcaggaagtcttcaggtttcttcagtgtaatttcaatcatctttaccattccaatgctgttttcttaagagttttttgttctttcaggtttttcgtgattgtcttgagcaattcatcagtcacaagacctttcattttcttgagagcaggtttaagcttgtttttagcttccagggtctctctatacatcctagcatcaatcgcattgaccttgtaatatgtcattataacttgaagaatcaatgcatcctggatgttctctgttaacttagcccatttgccataccgacgacctctaggaacagaggccatcatatagttatagtgtgcttggtcagataacccttgaccaacaaggttcataacataaacagcaggcatacagtcagcatgctgagaaagagcgttttcaaccatgaattttgaataatccatagtcgagatgttcaaatgctctttcttttcattaatagaaccgataatctcgaagaattgattttctgccttttctttatatgaatcagataattcctggactttcgcccagtctttacctaaccacgcgatttggtgctcattatactgatcatcatcttcaaataaactcatcatttccactgcatctctacaacaagttgaataagcatataaaccaaatgtaattcaatcgaagctgctacaccatgatactggttattttcaccaatgatttcatacattcggataatacttgggccagtaaccattgtatacagctcagaagaaagtttatctacaaaccaagtatagtctgctgcatatttcggagcaagagcacggagttctttgatgttcttggttttaatagcttcaatgacatcttcaattgaaccacggtcatttaaaacaatagacaagatacctgcatcaatcacacccttagaagaataatgatcaagcatgttgatggtcttacggaattctgggaaattctttttgaccaaagcagctacaactttcttatcttcaactaccacgccttcattttcacaaatcgcgagacaacgtttgagcatctcgatttgcattggcttaacatcagatggagatggtttaccaaaattaattacacggcaacgagactgaagaggtttaatgataccgtcaagattgtttgcagtaatgataatagtacagtttgtgctatacgcttccatgaatgaacgcaaatgtcgttgagattctgcaagacctgctcggtcgaattcgtcaatcacgataattttctgcttgcctgcaatagaagcagaacttgcaaatgcagttaacggtccacgaacgaaatcaattttacaatcagaaccattcacgaacatcatttcagcattaatgtcattacacaatgctttagctactgtagtcttaccggtgccaggagaagtgctatggagaattaaatgaggaatttttcctttagctactaaagccgaaaaaatttctttatcttcagcaggcaatacacactcagaaatagtacctggacgatatttctgttcccacataaagtctgcttcgtttactgtcaatttcatttatatttcctcattcagattaaagatggggccgaagccccgaatttattactcaaaatcaaaggtactatctgcttccattgctaccacataagaggctgatgcaccttcaaattttgctgcagtctgtttcttagcaccgttcatttttgcccacagcatcagcttgtaatcaccaacagtcattttcatattgctcatgttgatgatgaagttgaagttaccttcgccatcataatcaccgagggtcagggaatacttcggacgggtcagtgcagcgtcttctactttattataaccacgtagaacaattttaccatcaacgttggtgatagcaattgtgtcaatctgcataccacgagacactcgcatcagttgctgcaggtcttcacctttaaaatcaataattacgtttgctaccgggaatgggattggtttagtagggaacacgattgtgctcggatcagctgctggccagaaaatagtggaacgagcatctttaattgccaggttaccatcttcctgcatgataatatctgcatcgtcaccaaccagagacagaatgctaaggaaactgtttaggtcataaattgctacatcagtatcgatagtatcagagattgtggcttcagcataagtcgtaccgttaacagcacgagtcatgataaaattgccaggtttcagcatgataccagagttgatggtggagaagtttttcagaatgttcagagtttctttagagaatttcatttcaataccttttaattaagttcaggataattatatcaagctgcgaatgtagcagttaattcttctgcaacaatctgacctgccgcaacgagttgctcatcagcatctacacagtaatcattttctagacgttcgccaccatgacggtcagtaacaattttagcaccagccttgattgattcgttgtaatgcttacgcatcaattcaatccatttttctgcaacttcgtcgtcaatagatttatagaaagcaaagcgagcttcagaatctttaatcttatctttaatagctgctttagtttcttcagttagagccagaacccaagatttacgaatacgattttggttattcgggttggagtctgcacgtacgtttttaacctggatatctttcacatcaacaaaattaatcattatatttaccttaatcgtaataatcttcaaccatccaaccgggattcctgctggacatgactctattatattcatttcctgtaaaagcatctcgtaacatttcttctgttactaagtgcttttcatcagaaaacaaattagttaacacatatcgctttacttcaggaaaggccagcagatgctggccagttgtaaactcattcattccatcaccgtaaatcgtcctactttcttcatttgaagatgttggccgtatgcctgtgggtcatggtcacggtgagaaataataaacacattagcatctaccatcttattcagaatagcagttattgccttaacaccttctgcgtcggtagccgagtcgtagacttcgtcaaggaacagacagtttattttaacaccagaaaccttttcagcaatatcacgccacgtgaatagtaatgctatatcaattcgagctttttcaccttgactaaacgaggcataactaaattcttctcgtccacgcgatttaatcgtttcagagaactcttcgtttaacgtaaacgaatagtcagcttccataatttttaggtagctattaatttgcttattgaacatcgggatgtacttcttgatgatagctcctttaataccggagtctttcagcatttcagttaaaatacctcgacgatatttttccataaccaaattagttttgacgaggataattttatctaattcctcttgtagcagttcaatcttgtcagagttatcaatgaactcctgtgatgctttatcaattgctgctttaatacgacgtgctttatcaactgcagttaaagtcatctgcttcaaattactcatttgatttttgatgtctcttgcacgcgtacgaatagtattatactcgcgagctagttcatccagttcactctggcgcgtctttaactcgccaagaatggtattacattcttcaacatgatgattaatcttagtgattagagtgtcattagaatgcaaatcctgcaagcacgttgggcaatgaccacctttatcatacaacccaagaacctttgagtatgattcaattttagaacgaatcttaaaggttttaccttgaacttcttgaattgactctgctgggtcatcaccaatcacgagttcaagcagttcgctttgaagagtttctaattctgctttatatcctcgtgcctctttcacttgctcatcatacatcgcctgcaggcgagctacgttatcaccagaaagtttcttctgcttttctgcgtactcatgatgagttttaatttcattggttaatgcttcacgacgaacatcattaacttgaatctgctggttaatttctctgatttgggttttattcagtttgtccatatcagccaggagagacacctcaagtaggtcttcaacgagcttacgtctattcccagtggacaatcccatgaatggagtatatccggcagttcctagcacaacaatttgcttaaatgatgagtatgacattccgataaggctttcaaagtatgattggaaatcctttgaacttgcagcctcatcaagcttgtttccgtctcgtaaaatttcaaagacgtttggtttttgtccacgtttaatgtagaaactatgaccgtcatactccatccataattctactacagagtccttcttattaaaggagttaattaattgacctttcttaatatcacgaaatggttttccaaatagggcaaaggtgatggcttcaagcatagtacttttacctccaccattcttgcccgtgattaaggtcttttgacatttatcaagttgaatgtcaatagccgcctgaccaactgacattatattcttatatttgacacgatttagtttaaaagtcttcactgattttgtgcctcaatatataactgtttagacataacttttaaggccttgatgtcatctttagacaggtcttcaagtgcttggatatattcttccattaaatccaataagcttttaacttctacttcttcaccgtcttcagactcgaccgagttatctaccttagaaacagttcttaattcatgtactactttttcgagttcggattcaaactttggaagattttcatctactgcagtaacaataattcgcactgcaagatttctgaactcttcaaaatcaactttccctgtgacaggataaatcaattttctatgccaggtgatttcattagggacgaaatcaaaggttgataatccagtgtcttgaacccagaatccgcgtgggtcgttctcatcacccgctgtaagcgtccaaggcgttccgatgtacttaacgtttgctgcgcttgagatggtgtggaagtgtccagaccaaacttgcttgtactttttgaggaaatctggttccaacccatgagatttcatacctttataaaaatagaagccattaagctcccagtgaccaatgcagtattcagcagacgattctttgatatgcttcataatttccgatgtgttctcttcacacatccatgggcacaagtcaatcaaagtcccatcaaaatccatagtcgtaggtttatcaatcaccgtgatatggtcatacttaccaagaatttcagttgatgcattgggtgtcaacgtattcttgtagtgcatatcatggttgcctacaatagtgattaaattaattccttctccttcaagggattcagcaatttcacgagcaaattccattgtcttatgagtaatggctttacgaacgtcaaaaatatcaccatactgaatccaagtagtgatttcattttcttttgaatattcaatcgcctgttgaattccatgacgttgaacgtcttgaacccacgggtcatcgttgcggacacctaagtgccaatctccagtatgtagaattttcatataacctctctaatagagtttaattttatattattccgtgaatagcaaaaagggcccgaaggcccattacttattttgtcattaactcaaattgttctttaaagcaatgctcagaatcttggtgttctaccaggaattcatatgctttatttcgctctttatcatagagcttccggtcagatgacagatgtttcattcgttcaaagacttcatttttattttcatcattcaaccacaaaatgccagaatcatgagaagtcaacggctttccatcaacccggaatttcaaagcatcaccagtagctttatggaacacaggaatagttccacaagcgcctagttctaaatgtgtgtattccagcgaacgctcaaggaatttatccggaagacgtgacagctgatagccaaatccagactgagacatacgctcaagcatctcagagttaacatatcggtcaagaacttgaggattcagacctggcccagttttaacctgatgataatggcggcaataatcaatttcatagcgttctttgatgttaataaatgcaggactgcgttctaacccttccaagatagttgttttgcctgcggcccgcagatgactttcatgaaagtcaaacatcaagaaataacctttccatgtagtagtacgaccaatccaacgatggatatcaaaatcaatggcagagaagtctttccaatacttatcacgaattgctttgatgttcatagcaggttgaaagttataaaccggaggagctgagtcagaatcatcaaagaaactcaacccgccgcttggaaaatattcttccattagcacggtattaaaatcgccgtttgagctatgactaaacagtacatcagcacgcttaacggtttcttcaagaccagcatttctacgaagtgacaatgctctatggtcatgttgatatacgactacccgaacttcaggtttaatgttctctatgagcttcttatagttatcaatcgctgcttctggagcgttgacagcaggtactgagttgatgataagaatgtcacatgcgttaagcagagataaagtcttatcgtagtcatctgcaagagacacaggaatagttacatctttatagctatgtgctctattacgagtaaacgctttatctttagcgtaaatgatatttacttcatggccatgttttactaaccactcacggtgctcgagactgaacttggttacgccgcatccctcaagtccgcgagccattaaaatattaatcttcatatgttgacctttgttgttaattttgaatattttaccattcccgtaataaagcaaaagggccgaagccctttaaattttcttgtatacaacataacccgccgcttcacatatacgcttagcttcttcaaagcgtctaagcatatctaccttggcattatgaattgcttcataatcgggagcgggtgcttctctcctagcggtatcacatttatagcagaagtaactacgttttggtcctgtataacgttctgaacaattactgcaccggcacgtgtaatttccttccggccaatcatgtccaggattagaacccatcaaattcgtcatacatcccaattctcttcgctagtaataaaatccgggtgttcatctaaatcaatgaatccccagttttcttcgtttaccattcataccaccgtttaacctggaaggtgtcaacccagacaagagagttcttatctattagcttacatccttcggtagagcctaacacgcgatattgattatctgctacctttactgccatcgtaccagtcgcagtgtttaaagtaaatcctgcgtctttacgaacacgtttaaattttacttgtaccagcatttagaatgtcccaaacagatttacgagaggtattccagcaagtcagaataatctcatcattaaaaggttgttttaaaatagtacgcagtttttcaatagcatacttgtaagcagggaaattattgtctaataccgcgtctccagcatgagcttttaatcgctcaagttcacgacggtttttacgaacaattttgttggctcgagcaatagcttgttcttctgccgcttccattagtttctgttgaagttcgtcgcgctcttcctgggtaatattgttcatgttattcctttggatggtaatttatttcaaatgtgaattcagtatcagtccaattataactatgttcaattatagcagaatctgacctgaaatcagcgtcatgtggatttttcgggtcaatgtgaatatcaagatcaagcacctcccttaaatacatctttagcaaataagggatagcgtctaggtcttgcacatcttctaaaaacccgtcgaggttaatcttcagcctcatataaaaattccagattaggtccatcgcttgtaggttcgctctttttagcagaccctggcgccttataagcggtggattcatactgcgtcattttatcgtagatgtcctgaataaaggtttcatctgctaacgcaaccatatcatcgtcccgtgaatcatacacgttgtggacaaaatagctgtatttctttgccatttctttgcgttcttttttgatacgctgaacgaatgcattgaaacaagcttgggttatatacgcatgcgggttatcatacttagtttcatcgaagttgattaagcctttaattgcggcttcaatcccgtctgaaatcatttcttgcttccaggattgggtgtatcctgaaaagttgaaacgcttactcagaccttccgcgatcagcataatagcaaggccgatcgtatcgttctgttttactactcgaggaccgccagcagcttcagactcccgacacttctctttccatgcacagattgatttatacagttccttgttatttacataattactcatattgcctcttcgcttcaattaataatatctattataacaaatttgggaagcgagaggattaaagcattacttaatcaattcagcgcatgcaattaatttcatcatgatacgataaaaatcgttatatgtgaaatttagcggaacttcaataacggcttcaaaatcttcaaatacgcgctccattccataaccagcgatatcatctgattcagcataccagtacgttccatcttgtgcaaaagttatttggctattttcaagacagaacacacctttaatattttcatgtgtaagagtcaattgaattttcatagttcacccttcataatacgatagcattggaacagctgttccatgatatgtttgaactcaaccaaactaagttcaaaccaatcagattcatctacttcatgcatcatttccatgaatgaagagtataaactttcataatgagtttcatttaacatagaggcatgcgtttcccaatacatgccctcttcattgtcaaaccaaacacccatataagaatctatagtaaatccgccaatgccttctactacaatcataatttggtttactttagccatgcattcaccgagtcaatagcgtcttcaaatttagagaaagcatccacggatgtgtattcattctcaccagagcgttcataaatccaaaacgcgtcaaaatcttcttcaatgatgaattctccgttaggagtttcaatcgtgtttctgccatcaggcgttttagatatgaaccatccaagaaaaccaacttctgcaatctgttcttcagtcatttaaaatttccaccaattgattatagtttaatgcttttccagaagaaatcataacattacaaaatctgtataatgcttcttttgatactttatacacgtaatcggaagttgttacaatgtatgaaatacgtacaaatgttggggatttttctgctaattcatacgccagttttctagctctgccaatgtcatcagcaaacttggtatcagcaagcaaaatactatcaaatacccaacggttagtaaaaatttctgtgtatagaataaccttacgcatcaagatactctcgcagttcctgctcgtttaacccttcttgccacatctctgacggagacggaagttggctgtctagagtggatgaatcaattggaaatactctgataattacgctagtatcttcatcccattgatttgcgagtatccgtttagcctgactaatatcaggctcagaatgagcccggatatacttaatccttctatgccatacacctgtaggaatagatgcgcatacgatatatgaaatcatttcgccgccttaaccgctttaacatcgcggaagcctttcttacgttgattcttcatcttacgaatagtgctttcagaaatttcaccgatacccggagtgattggttctacaccaaaggctttgatgccaaattcagacagaagataagcaaccactaattcacggatgcgggctttaccaattttttggccttcttctttcatcgtaccgtgaagctcaacttcccactgatcaagcaaagacggagttacacaacgtccttcttccagcattgcagatactttatcataagcaaaagagttcagtacgtttttgattgcttgggacatattaatttcctcagtaacgattgttttgacagaggagattttaaatcaaatctcctgtagcaaatcaatctttgagagattttagctcttcgagcatatcatagtattctttactagcaaccggagctacagtgcagtggtagctatttaattcatgatatttcacgaagcgttcaagttgccactcaatcagattgttaattcggtgaagcagaaccccctctgaaccgacgtagacaactacttcaaattgaagcccatcccaaattctggtacggacgatatcacctacattaaatgttttcatgcgatgtaccaatgttcgttttgccaagactcacccttgtaccagcgagtcatatcatatccgttctcgtcacggatagcgccattacgcatatagaagtactcgtcatcagtaaaatactcatgcttaacgatacatcctttacgcatagcttctagagcttgctgccaatttaaccaattcatattttcctctcgagttaaacggtatgctgttatccgttgatagggctatggtatcactcatcaactagcttgtaaacaactttgtgaaatgaatttaaaataaaagagaggtcccataggaacctctaaatgaagggtatagaaatatacagaaggtggtcaagatgaccttagaaaggaactggctaatcttctatgatatctggatcgtatccagcagcaataagattggctttaaatgttggaatgtcatactgcttaacgctatccataaaaatgacaggataccgaatagcaagcgatggatagcacccgatgcgtttagcaagtgactcaatcagcggacggtcataaaccggctgaccgtcaacctcgttgattacattatagaactcatacggaagttgcagcttatcgagcaagtcacgaactgctttgcatccagggcatctccaaacctcttcagggatgccatagatttctatcatagttcagccttaatctcagaaatcaatctttcaattaattcaagtttatccgctgtagtcataggataaattttgtcaacagtggcttcttcgagatagcaacggtcagcatcattaagtatacaccactgatcaaaatcatcagcatctatgctaacaccgttgaaggtcttaactcgttcaacagacccgtcctgtgtcagagctgttaccaaaaatggcttaaacttgagcatgttgtagaattcaacatcctttgacgatgcgttatttagccatttatcaacagagtcttctttaaacttgtaccacttatcgcaacaaaataattctatcatttcatgacctgttgaagtttggcagtcagagtattaacacgcttctgaaattcttcattagacagtttttcatctttcttggtaggattaatccagtcagaaataatgatgagaacaataaatggaatagctacgaaagcacctgcggttaatgcaaccagcgcaataacattagaaataaatttacgaatagcattaatgaatttcataattttccttaaatagttaagatgaatgctgtcatagccagaaattctggtccaaacagttcagtagccatgtggttcagagtaaacataattttgtaagtcagcatataaatttcctcaatcatgtgtccaggtagaaccgtttcttacccagagtctttggttatcagaaccacgccaatttttagtggttggcagtgattgctcgtatttcccatcaattataacatcaatgtgttgtagcaaatctaagtctttaatatcttcaaatttatatcctgtccacatccagatatctttctccggaaatcttgctttaacccaagaaactaaatttgaaatctcttcccggttctgtggataaagcgggtctccaccagttaaggtaagaccttggatatacgatttgcttaaatgggatgcaagctctttaacagtattcatagtgaataactggccgtttctagcattccaagtagatttattataacacccttcgcatttatgcaaacacccggtgacaaaaagaacgaccctgcatccagggccattcacaaagtcagaagggtagattctgtcgaaattcattgaaccttacctcattacgtgcttctacttctgcatcatatttccagggctcatcagtttgaatagccccagccgataatccactttcagggtcacgggttatagcaattccaagcgggtgcagaacctctttgttgattttccaaatcaatccccattcgctaagttggttccaatcaacttgcttcattggtttctctaacatgttttaccctatgcataatttctttgttcttaccaagattgaacccacgctcagaaggattaccaagatagccacaagtcctacggattgtattcattttctttggatcagtttcaccgcaaattgagcaagtgaatccgttttcagtaggtgtcatctcatgagtagaaccgcaagaaagacatttatctactggcatattaacaccaaaataatccaacttctcgatagcatagtcccataccgcttcaagaccttcaaggttgcgcttcatgtcaggaagttcaacataagaaatatgaccacctttagcaatataatgatatggtgcttcacggtcaatcttttcaaaaggcgacaggttttcttctactgacacatggaagctattagtgtaccagcctttatcagttacgccctttacatctccaaatttggcttggtcaatcttacaaaaacgatagcatagactttcagccggagttgagtacagactaaaggcataaccggtttcttccgaccatttgtttagcttagtattgatatacttcaggacgagtttaccgcttccttttaatgtaagcatatcaaattcatggatgccaatatatcctaatgaaattgaactacgtccatttttgaatagttcaagaatttcatcatcaggtttcatacgcacaccaaaagcaccttcctgataaagaataggagcaactgatgcagtaacaccttcaagggatttaattctagttaaaagagcttctttacaaatatcaagacgttcatccagtagtttgaacagtttattactgtcatctgaacttttataatttgcatccagagctatcctagggaggttcagtgttactacccctagattattacggccatcaagaacgggtttgccagaagagtctctccaagcaccaaggaaacttctacagcccattggagatacaggagtttctgaaccggtaattgctctattatttcgagcactgatgatatcaggatacatacgtttagctgcgcattctaatgcaagctgcttaatatcatagttcgggtcttctttacgtagattaatgccttcttctacaaacatcacaagctttggaaagattggagtaattccatcgcgtcctaatccacgaatacgattatcaagaatagctcgttgaattaatttttcttcccatgacgtgcccataccaaatgtgatagtcacaaacggagtttggccatttgagctgaacaaagtattcacttcatattcatatgcctggaaagcatcaaatacgtctttttctgtttttgaaatagcataatcttttactaatgctacttgatatttgcgtgcatcacgtacatgtttagcgaatgtcttctctacataaggagccaatactaaatcgacgttagcaaacgtagttccaccatattggtgagatgctacttgtgcagtgatttgcgccatgatagcagtagctactccaatactcttaggagtttcaatttgagcgttaccaagtttaaagccgttctgcaacatacccttcaaatctaccaaacagcagttagtgaaaggcaaagctggactatagtccatatcatgaaaatggataacaccttctttgtgtgcttccattacagaggcaggaatgacctgattagcgatatgtttagatacgataccagccatcaggtcacgttgggtaggaaaaacgcgagaatctttgttagcattctcgtttaagaggtccttgttggttttattaataagtccctggatttctaattcaatattcattttaaactcttacgaagctgcttcttgtattttgaagcaagttgtgattttccatcactttcctcgtatgtaaacccatgcaattccatttcagcaatcatctcaggtttaccaagacgtgaaaagcgtttagccatatcggcaacatattgcgggtgaatattattgtctttacgattctggcggagatagaccagcaaattctctaaccattcgaggtagtcaatatcttgaccttttaaaccagaacggttgaacttatgcttcatttggccttctgccgcattgcacaggttacagagcaagcctctgacctttcctgcattgtcaccttctaacgcatggtcatggtcgaggtggttcttttgaatatcctcatctaaaggacgtttgcagcaaggacataaaccgttctgtgccttatatagtttttctttttcttctttatataacttacctgttaataacattactcttacctcagcgattagataagagtatttatagttaaattaacgagtaactactatatacattatgattagattctttgatgcagaatgaagtacagaaagcatatatgccttcataatcgtctacagtgaactcaatgtatgaattagtttcttcatgaagaagactcattttagtccaagccattccattgatgtcatcgtcgtaatagcctccactaaattctactatatcgccaacttcataccaatgactgcgtaaaatttcttttgtaacacgatgaatatcagcgaaatcgagaatttttactgtaatagttttagtaatgcacgatttagacatggcgaactccaagacgttgttcaagtgcgacaatgtaatccgcagctttttgcattaaagcatactcttctgaatcacaattttcctgtccagcaaatgcgtaaagagctctggtaattggaacgattgcaccttggaaatggttaagtttaatttcagaaatcagaggaacatcttcaccttggccaatttctttaatttggtgcatcgtatcttcgttgtagaaacaccagaaccaagattcgccgtgtggagttgggtcgttaatagtaatgattttgtttgtcagcaaatcaattacagcagtaattccacatgtttcaaggtcatcttcattaactgcattgataacctgaaatttaaatccaggaacaaactggggaaattgttcagttaattcatcatcattttctataacttcaaactgcttaccaataagtcccattcactttgtcctcataatcaagtagttcgtttatggtaggttcagaggtattataatcctcttcaggaatagcatcttcctctggctcgacagtttcccatcgagccgcataccatggttttaaacctttgctactttgcatggtgttggttcagaatcattagcagaatcatgttcaatacgccattcaacttcagtgcgagtaaccactttttcatggcgagaaacgatatttacttcaggaggactataataccaatcagtatgatatgaacctgaacgagattctgataccatgaaatgaacgccgcgtgctggataataccaaatttgagtgcggtcttgatacttgtgctcttgtgtccaatctccatcttctactaaaacaaagatttcttctgcatcgtcgtctggtgcatttggcggatattcaaaatcgtagttgtcgtcccattcaccggtgacaccagcaatccgtttgatttcttttactaattcagcgttagtcattttaacctcgcagcttctgtaagtcttcatcatcaatccagctttctaaaccagacggaagtgcacactcaatttcccacagcagttcttcaatagcttgcaagcggatgaactcttctgctgaaattgttaccatgcacggagcttttaaatcaccaatatcataactcatagttcttcctcatgccaagaacagtcaacttcaaagtctggaccaaggtcttcatcttcccaacgccaagaccctaacggattaccagcatcgttgtaatcaatttcaagaccaatataactccactgaacaccatgaatggtatttccttgctttacaaagaattcaccccattggtgcatgaaagcatactgtggatcagatatagctctttcaatcattgcttcacgaagattacgttctaaatctacttggtcgccttcaagaaaaacaaactcaattgggtatttcataatttcaccatacactcgccgtatttccatttagacataaccttaactccattagagtaagttacctctaccttcgctcggtgattcttaatctgcttaatttcaccagtttccaatccaccgtagccataataaagagctacaatatcaccctcccgaaggagggttccacgataatcatgcattgaatttgaatttacggagttcatcaaaaccgccgatatgtgtaccgtcaggagcaaaaatctgaggcatagttaatccaacttgcgattcacgtcctaaacggcgaagcaaatcactgataaccacttcatcaaatacacctttttctggcattacattgatgaatgcatactcttgtttcttaacatcgagcagacgctttgcattatcgcaaaatacacacttatgaatgctgctgtcgtaaccaaaaaccgtgaacatcttcttctatttccttaaatacttgagcttgaacttggttccaactcgggtgtttatacgctttataaacgttaatcattccaaggcgcttcgtgacttcgccatcaattgcagcttgggcaaaatttcttccacgggtcatagctcctttgagattggagctgttagcaatttgaccagtctcattataataaaccgaatacatgagtagcattactcgttcggcttcttccatatatcgtttacgagccattttcagccttagtagttataactaatgttttaccatctaacgcatcgagaatatctttgatgcaattatctggcattggttgaacactagctaattgcctagcaatatcatcaggaattcccatgcgaggaatatttaatttgctaaaatcaattttatccattagcagttaccgggaagtgttctgccaatttagcggcgatggcagcgttaatttgatcagcgaaattcttattcattgcgttaacaatgatttcttgaattcggcggttagcgctttcaatagacagcttaatacgaccttcagcttgcttaacagcatcatcaatagtttgacgaaccatatcatcaatagcatttttagcacatgattgggtagcgttacgcatcatgtgcgacatttcttctttagcagaaatatcactccaaccacgagtatggaacatctgctgaagctgtttcttaacttccgctcgaacatctggaatagttactgttgcaatattaacttaagattgtactgcttgttttagtttattctgggaatcttttaacaccatttctttaacgatgttattgattactgactgctgcagttgagcacgggctgctgtaccttctgggaataactggcgtactgcataagtatctaatttaatgtcaatcattttaattttctctcaaatttatgcttacaagtccgacatttcattttcagaatatcggttgtccaatcaacaagctgtacttgaatactaccacatttttcacaaggcacaacttgtttagctgcagcttctcgacggtctaccatttcaagacaggcattccagtcaattttgaattcaggtacaggtggatactcaaactcaatttcaaggtcgttatcatcaacgaccatgtcttcttttaattggtttctcacagcaagctccgggcatactcgagagattcataccgctctttgtactcattaagcgatttgactaaatctgccatcatcaattcatgtttagccaattcagcttcttttgtatcaataaaccgcttaactgattccatttcagctgtaatactgtttttagcgatttcaatatgatttactggtgttaatggaagaggtttaacaacattgagatacatatgtgctacatcttcatcaataactggggtggtgctcaatgttttaggaaaaatcttaaatgggtccaaatgtacttcaagaacagatgagttttcaccttgctgtttacagcatgtttttttaactacatccatatgctctaaagcagtacgaacttgcgctaaaagcgcccgggccggatactttccgctggacaaatggctgttaatatgaattcgtacagttacattgtcaagttcttcggcacgaatgaatgaaacacccttaggatttctagaactagtagaagatacctggtatttcacacggtcatcgcctttaagcaagcaaattgaacgattaagaatacggcgcaggtttgcattaaattcagaacagaaaatttgagcagcgctgcggtcatgtctttcttcggttttaaacgctcctgccgcaaaattataacgctggccgtaaattttagcattgccgatagcaaactttttgagctgtttctctgctgacattgcacctaaccagcgagaacgacgaatgttttctacaacaaaaccagcataattggcttcatgcgctgccatgctatttagcacacgacgagctacattaccagcaattgctacattataagcagctgggtttaaatcatgcaaagctgccaaaacctttacgtgcttctcacgctttgacaacccctttccattatgcttatcaaattcaccagctacaaacatctttaattcattcttattcattatcttttcctctattttggactgggctcaaagagtatctcaaaatctccctgaacccattatacaacaattattcttcaagcattataactttgcttgggcgcttatagaaagcatgagttttatcatctttcgctaattcaaatgtagcagtaaactgtactttgcctctgtattcaaacggaatactttttggaagggagccgtaaaccgtagctccattctcaagtacaaccatcatcttacattgtacgccgtaatagtcttcataaacttttactgacgttacggtaccggagacagtcactcgtccttctggtgcatcccctttattcttattcagctcattgaatatattatcaaagacctgttttgaatgttcctggatagcctctaagatgctcttatgggctctaacttctgccataacaacatctgttccgtcttgcaatttccactctttatatggaacgcgtacttcaagaggataaccatactcgcgaagttctttgtactccgcttgagttaagcggagtttccaccaaccgtggtcacctgtatactcaggcttatccagcgaatcaaattctgtaacatacggcaagtaactgcccgcgtgataagcttcaacttcacctaattcattttcccaaagataaccatcaaagggagcatgagggcgatcatctttgccccaagtaggagctacaactttatcaaagtattcacgaccgaagcgggtcttcgcccatccagcattcaactcctcggcgcgtttttcaactttcgctcggtgtgcttggcgggctacacgattttcttcaacaagtgcagagataatctcggttaaagttttcattttattctccagtttggttgacgagaccatcttatcaacagcctcgccgaaagtaaactactttgtgaaaaattttctccaaagcagaactgcatctctacgagatacttctactgctcctagagcaactgcttgcttgcgacgaacatcgcgcaaatcatagtgtggaactcgcttatcttggaaccaagaacgtttcattccgatggcttctgccatagcgtgtaactcatcaaggttgtcgctaaacatatgacaattctttacttgatgacctctcattttccaaccatgattcatcaagacatctacgtatactgtcatttctgattctcggtgtaggtttcaatgatgaactgtgctaaacatagaagattatcttctgaaggagaatctactaaattctcaaccatttcagaaatagttccaaaagcttcttcagtattgaacatttcttgaagttcgttccaagtaggtgctttcatttcaatctcctcattagttaacggaagctatcttatcatggcttttctaagatgtaaacaacaaaagggcccgaaggcccttaaaaagatcggaaatcactgttaaaccatggcgactggtgctgtcgccgcttaagcaatttcagttggtatttcctattgtcttctataatcatcttagaggcttttagctcttcagccaatgagacctgtttacggtccatcaagatgaggttctgggtcttctgggcaaacgtctgaatacctttgagacattccacagattcctccatccctcgtttatacttggttcgggcagcatttaactgcccttcgtaatacgcatgtatagacactatagtactaaacaccttttacctcaataacatctaagataatatcttcaacgtcttgctcagggaatgccacgccattggtctgcccatgctgaaatactgcttggtacgctgacggcgcagaaattcgggttgaacgttctttattgtcatagcatttgccatcaataaagcgtttaaatttaacttcataggtttttaacattattacaccttagcataattgacgatttgttcacgatcagcgggccaatttaaatcagaacgtttcttgtttgaccacgcaatattttcttcagcccaatgaagtttagccgatacgctcttttgtacgtctctgattgcttcttcaagataaatgcctaaatctctcgggttagttccttgagttttaaatgcattgagcaaaatatttcttacgacttctttaaattgattttcaacttccgggtgaatgaattcgcgataaccattgcatggatatccgaaagcatctaccatacgagtagtactaaattctttgctcataatccgagggcctcgcgttcatcaggatttaatttagccaaagcggcttctttaattttttccaaccgtttacgcttagcttcaggtgtttcttcctgaacactaatagcagcgcttttaggaaaagtccatgatttaccattttcatcggtgaatgtaattagttttgttggcttacgattaactgtaccatctgagccccaccaagactgccccttaactgcttcttcggcaacgcaatatgaaccataataaccaaacaactcactacggcgatcgtctggtgaaacatacgctgcataggcttcactttctgtcattacccatttcattttaacacctcatagcgaataagttcaatacgatttttaagctcttggtatgatttacgccaaggcttataataagcatttaaatcttggtgttgtttatgcatttcgtctaaatgctttactgcatcctgcacatttgcaaggaaagtatcaaatactttattagcgtattctttcctgagttcaatgaatggaggtgcacggaacacatttaccattacagaaagctcatgataagaagaatggacttcagctaatacatttttcttatcgccaaagttaaacttataaagtttttcacagattgcttcacaggctttctctgctttacccttgggtttacccgcaaagatgtgtcctggcggatatactttaatatcgtttaaccaacattcaatatctttaatagctgctaaactcattgtacccacgctccgttttcatcaatgtaattaatccactcgttaatagtccaggaagaggtatcacctttaggagtatcagcgatatacattccgcctttaaacaaaacacgttttacatcattagaaattaaagtagccattatattttcctcagttagggaggatttctcctcccgtttaaattatttcagcattgttacttcagcgattgtccgccaatttttacggtcagtcgcgacgaaatcaccaatataaagagcagtacggagagatacgttacgcagacgatttacgttatctttcataaattccaaaacttcaataacttcagaatttcttaacccacggttctgtaacatagaagtggtcattactacatcttgaacgcggaccataatctcttcattagtgtgaacaccaaggtcaagataaactgaacgagatactaaagcgttcaggtgaggagcgagtttagaaccgcgctctaattcacggtcaatatcaacgttagtgataaagaccacagtaccttcaaactcaaactcattaggaattcctttatcttccaagaaagaagatgcagtgctccagcatactttacgtttctcccctgaatccaaagcagctttcagaaggttaagaatgtccatatcagagaatacatctacatcatcaatgagcagaactgaatttgcttcacgtgattcccaaagacggcagtataaaccaattcctgagattttaccgttcactgatttgtaatcaatagcgttagtatcatgggcatgttgtaatgctttatccaaagagtaagtcttaccgatacctgctgctccggagataatcagagaacgaatattcccgtggattaaaccgttagtcattaatcccatgacgttaaagcgtttcttgatacgctctttcatttcatcaacggattcaacaacttcaattttagcagctactccgtcaattacgatatcatctttgaatacccaaacaccacgctttttaccattcagttcaacaaagactttaccatcaccctgacgagaatcttcagcacttaagctatccgggaaccactcaccgagtaactcataagtacctgaaatctctttgccgaagtaaatccctttcttgatggtgatagttgacattttattctccattactctgttttgttttgatggagctatagtatcattctacagctccaaagtaaactactttgtgcattcttttgaaacaaaaagaggagcccgaaggctcctcagttatgcatgcttattgatagcattttctgctatacgttttggaagtttacctgcccagcggaagaacatgataattgctccggcaataaacgcagggaaccaaaagatgagataaaaccaatactctcctgctttctcgatggttccatttttgattagatgcttacagacagaccaacccacgataaagtaaattattgcaacaacgattggcactactatgctccaaagtaaaatcatatttcagcccagtaaagtgataaccggagagtttctccggcccatgacataaaacgatgtacttgttttcgagtaggtcgagcagagaacttagcattctctctacgaccagtctctctgcaaactgcttccaaataccaccgtctacctttatgaggtcttccataattcaagaagaccttcattgtatcatttgtagtaagaattgtggttttcaagataaaccttctcgacgaaatcgtcccagaatttcatgtctactttcttaggcattccattcttttcggcttgatgagcaagacgctctactgcgtcaacggtcgtttccaaaatatcctgaacttctttgaacggtaactcacccgctttgattttcttaatcaagggagcctgcgctagaggatacttaaggtcaccggatgaataaatctcctgcagctgaagaccaccacgaagggcatgactcagcgctttccaatctacgccttcgttggcttctgccttacgagcacgttcaccatattcagcatcaagcttctcaagggagtacttcatttctttaactgtgatagttgtctggaatttacgacctaacacattatagaaatactgctgacctgatttatggtctgtaaaggtggtccactcaaggaattcacctaccggaagacgatcggcaatgtccttaactttccaacggtcgttaatgcctttctgcttgggacgatcgtcatatttccattcaggaacatctctgataacatccaggactttatgtaaatcggctaaacgagaacccttaacaccatacttacctgcttgcttacggacatatccaagataagccttcatgtcagtagtatagaaacgagctcggttgtcttgaatgaatttccatacttcaggaaggtcagatgcaactaccaattccggtggagtatgcagcatatccaacgcgacagtttcaccgtcagcagcgagcttgaagaaatactttaagctgaacagctcatggtcgacgtcgtctttcgtatttttggttgcgctgttattagtattacgattagtatgattcatcgcttgacacaacagaacatcacgcggatgaggaacaaagatttctttaaaatccacatctgactcgggagttgaagtaccatacagatgtgaaccaaaataagattttacgattgttttcataagtaaatatgattccctttagcgaatttaactaatgcattagaactcttggcggcttcttctgctcgagttttatctgtagttctttttgatgtacgataaacattaccaattttttgactggtgtaataatacactacctcatgagtatgatactcttgtccatcaggatgctgctcacgacaggtgtcttcgcgtaatgttgtttcatacataggaactaatgcccaatcaattcctatgctaatgattgccacctgaatgtcaagtctgttccagcgaaatgaattgatatatcctaggacccgtgattccgggtccatcattgcgaatttaatgttttcggctgaagccagaggcatctgttttacaatgctcatactaagttttttcttagtagttacgagttcaatttccatgacccgccctcataatatatgtctaaatcaatgttatctttgccgctgtacttgccagtcaaaggaataaatttaaccgtaaccttttcgccgtcatcaaaagtaaattcggcaatagggtatgtagaaattataccacgttcggttttagcacgaaatacggcccgaaggccgttcacgatataaacttgatcattcttcactagttttaccttctacataatcaatcattgggcagactttccgcttacgggcttttaaatactggacaaataacgatggttcggcttctgccggaagacccgcttttacccgagccagttttttggtatactgtttctgattgcggtagtgtttaaatttttctaaaccaaaaataaatccaaacgctatagctgcaaataaaagcacaaatgctgctataaccactgcgccaactggtactgctataacatttaaccaaagcgcagataaactaatacccatccaagcgagaattcctgtctctgccacaatcggccaaccgaacatccatgcaacagaaccgatgaatgtgataatcgctgaagagaatagaacatgaagtactgttgtccagaagtatccacatagagtttttggcattttccacatgttgtcagatttaaaccacaggttcattttgaaatgccaagagtttttattaatattcattagttatcctgtttcatagttggaatcattgcggtaagatatttgaccagttcaatagcgtcgcttttatcaatagctacacaatctccgtcacgttcaatttcgatgatagtattacgttcatacgtgtgaaataccgtaagatacaaatcaataatatgcgggctttcatcttcaattactgcatcgcctttacgggattttccgtcccattctaatttactcgccatcttttgcctctatcaagaattgaattaacgaatcaatttgtttagtatcaagatgaattatatcattgccctgttttagcacgatacgactcaactttttagtgaaatacgaattcacaacctttacatgcacatcgctgtacggattatctaaattgttactatcaagaatactttccataattacctcaattgtgaatcttttgaaccgcgacgattataggcagaagtcattacactgtcccactttccttgacattctacacaccgttgacagcctttaaccaacagacgacgagctactgggatttcctcatcacaatcaacacagaactcttcggattcccgctgttcttggagctgtttctggagacgggcccattcaatcccgtctgctattgtagcttcacgagttgcaaatccgtcatctgatggaccccatccgttcatttcaaactctccagaatcatttgcaccaaattatatgtaaacatcggatgctggtattgtaccacaatatagatgataaataaaacgtttctcattcttcgccatcatcaaagtcgtagtaatcataatcacaactgtcaagataagaatccataaattctttctgacgacggaagtcttcaataggagttaatctgtcagcgtatgcttgatcatctggatcgctgaacttatcttcttgcaattctttaatgaactgttcagcttcttcacgcgtccaaaacccacgattaagattatgaaccgaacgtttttcacctggcttgaatacgcccatatcatgagcagaacgctcagttgaataactttcagttttgccggcatagttttcatattcacaaatcaccttgaagaaaggagattttcgcgaatacacaccacgaagaccaagttcaacatcatacgtgcctgatgcaacaatgtaacgcgaaatagaaccagacttggtttcagtgcgattaacaccacacacgtgataaaagatttttccaggttgaagctcggtagttaacttaatcataatgtttttctcgtttggttgttgatatgtctatagtatcatgtaatgaagggaagtaaacaactttttgaaaagaaaatgcctcccgaaggaggcggagggtattactgcaatgataacaaatacttagtcttgtagcatagacctgtaatgtcatccagaacactttggagggcggcaggaactgacttgtagataccatcggccttagccagaatgaggtctagcatttcaatggtatcctttggcagctctttctgtgatggtaaagccggtgtataactcttacctgagaatcctaaccactgctcaccaaaagcatctatcaaatctggaatctcgttaaagaaaacttcatacgctttatgcctggcatacgatttggtatcaaaatgcgctgaatgaaaatacgcttgagacgccataagtaaaccgatgaattcatcttgtggagtaagtttaccgtcctttacaaaatcattgaacttcattatcgagttgtatcctcatgcggttagcatattcttcacctgctgaacgtcctaaagaatcgcaatctttagaacaagactcgctcttccatttactttgtatgaaagcatagaactgttcagactcttgcttactaggctccttaaatttagcataaacttgtagagctccctcaacatacgaattataatctgaaatgtcgtcgtgtgatgcagctgggaatgaaatcccgcagcccaacaccagggctaagcaaatgtgattaaaggccatacggcctcctattatttttgtccagtattacgtttgtgctgaagtacagccttaacttctttgaggtatttttccagcttacgtttacgggtataatctgcttttgaactatgttgacgaatttcttcctgaaggtgcgaaataccatgcccaatctcacgacgaagttcgtccagctgctctacagtaagattacgaagttgcttttcacttaaatgctgcatatacacctcatcagttagtaatagtatttatataagtatgtgttacttaatcccaaaggcattcgcagatgccttgctcaatggttctagcaccagcttcgtcccagttatattcttcatcatacttcagtgcgcgtttaatttcggctttatgaaataaacgcggaaccggcatagcataacgggtccaacgtagagttttccagaatccatcgcgctttgatttagcgatcagtttcttggcctctaacggtctttccctgttttcagaaatacacaattctacatatttctgctggttttctttatctttctgagttttaacgtattcgttatagcttttaatataagcaaattcgttattattctgatcgttccatttggaagattttactacatgccagcctttacggcgaattgttctagacattattacctcgttaagttaaattacctcaacgatagtaaaatcctgatttgaaaaatttaatattcatgaatagatgaccttgcatttacattttggacattcaggttctttggttttaagacgcttggtagtagtctttggagcagtgttgtaatcatatacatgaagacaacgatagcacatcacatatttttcatattaaaccaataacgaaagcaatattacgtatagtaaaaacccaatcacgagtactagtactataccacccgctatagcaaataggctactcatgtttaatataacacccattcgtattagcaataaagtctttaccctgtgccaatactttacattcggaattaagacgattttgcatttcttctcgtctatcgctttgtatagatgctgccacaccaatccaaatgaatagcatacccataattagcatcaggatagtgttatacgttcttggcttcattataaacacctaccagttcgcaccagtgtttacgacaaagagaaacgtatttgtcttcaccaccaagttctactacttcaccatcggtaatagcatttccgttttcgtcaatacgagctaccattgtagccttacgtccacagtggcaaacgcccttgagctcaacaagtttatcggctacagaaagaagagctttagaaccttcgaataactcgccgcgaaaatcagtgcgaagcccatatgccattactggaacatcatacaagtcaacgattttacatagctgaagaacatgttcagcagtcaagaattgggcttcatcaacgaaaacacaatgaatatcacgctgtgtttgtgcccacttgaaaaactcaaggatatcaatagattcgtctactgtattagcttcatgacgaagaccaatacgtgatgttacctcggtggcagaatctcgagtatcaatagcaggtttaagaatgagagttcccattcctcgttctttatagttatgagctgccgtgaggaggttagccgatttgcctgcgttcatactcgcatagttgaaataaagctgagccattaaagggtctccataaaatcagaaatagctttcttagaacgaatgagttcatcgtattcttcaggtagaccatttccgtaaatggcactaatagctactacttgctcagcacctgcataatcgtcaatcaactgccacagtttagttttttgctcttcagtaatcatctatttacctctaacaaaacagatttagcttttagcctcttcatattctaccaccataatgtcaatatcaggtgttgctaaattgattaatttctcaattagttcccaatcaccgccagcaataccagctccaatttttggaatgtatagaggacgattataaacaacacgaccagaatttagttcatggaatgcgttaaagattgcgccataatcaacatttggacctggcgcatactgagtgtatagattatagcaatatgcagtgccgttcttgtgggtagctcgtgtatgagttccaagcttagctaaattgttgtcataataacggtcttcatcgatgtcaatatctaaaatcggcggatatgctttagcaagctgtccagctacaccggcacccattgtagtaaagcaattacatccatgagcaatatcacattcatgcttcatgaatagttctacaatattacccttgatatatccagtaatcatttattcacctacggaattttataagttgcatattcattaagattattgtatactcttaaaaatatagcattgttacagttaaggatagggtttaacacgccttgttctttagggtgcattactccgtcaatagaaacgccgtcactctgcattccacatccacgagcgttatattcgacaagtggaactattacctggtcatctttatcttgataattataaaatgacattagcaattttctactgctaggaacaaatgctatttcaatgttgttcttgaatgggccattactttctattttagtcccctgtgctgcaagcacagtttcaggatagcctgggagcttttcccaggcattaactgaaaatgcgcagcataataaaatagccgcttttttcattttgacgatagtcctgacatataacgagccattaattggtcacgatacattaaacatatattttcgttaggagcattgacacataaatctttcatgctcttagccttacgatttattagtgttgtccactgagccggactacgtgaatcttttactccatcgctgaatgccgaatctaattcaagcgctaatatatcaacacattcagagttcgtattgcaaaatgttttagcgatacgaagtgaatccgacattgaattttcagcattaacagagaatgccaatactaatccaagaagcgcggcgtactttatcattattccacctttatatgtagcattttatgtttctttaagaaatgagctttctctaggacatctgacgcataagagtttcctcttttgacattccatcctgcgttataactagcaagagcttttcgcatattgccgttatgtatatttaaccaatatgaaagctcaatatatgcccattccgcggaattctgtctagatttaagcatttttcttatttcagaatcactaaggtttttgccctctaatttagctctggctttaaccgtaggcaagtaattttgaaataccccataagaatgatgcccctttcctgcttttaaattggctcctgccgaagattctttccatgatatagcagccattatatatcctaagccgttattatcataacgattttgtggctctttctctttaccagatttttgatattgttcaccaaaattatatgcgtaatgcaagttatcaagttgacttgaagtaaataatggttctgatgcatttgaaatattaatcaaaaataacccagataatattaaaagtttacagttttttaaaaaagtcatattcaactaatcccttataatttacatttggaaatcctttgctaattgcaatagttgtaaatctaccgcactttggtttatttgaatctatccataaatcatataatttagtatacatgggttcatgccaaatcggtgattttctcattccctttttctttttatctactacttctattgaattctgtataattttagcattttttatattatttgggtctttgtaaaaattaattctagcaatactcattttttctttagaacaagcacgatttaacgcttctttatgtttttccaaatttaatgaatttgaataaaaagcttttaatgtatttgattgttttattctattgctaggatttttataatattctttaagcttatttgattgagcttttgaaaataattttttagcttctgcatagtctttagcggaaatatagtattgtctatttccagtatttgtattactcatattccaccatgcagttaaaactccatagtgatttggatatatttttgctaaatacttatgggctaaataatgttcttcggctgttaataatactaagttttccttatcatcagaacctcccatgcatttaggaattatatgatggctttcagtataaaaatttaaagcattcttatttaatcctctttttttagaaatttctataatatgattatacatagtaatccaattcatgtttacctcaattaatgtgtataacttttgtgctgattttacctttcaaacgtttatcattaacgaatgccatacgacactttatactaggtccttttcctggtcttggaatatccatggtaaatcctagccacagatttccatccgtaatttctaaccgcattggcttatactcgatattttcatcaatgtcttttgggtcaattggaagccaaggcattgctaaaaattcattaatttctttaagatgattaggaattttggaaagaacagagaatacatactcttcatcaatttcacgttggatagcacggtccaacaaatgatcagagtacttagtgaagaaaggctctttaccctcggctttcgcccgggcacgaactgataaattcaaagagcgaaaagcttcctcaaacttacgacgcagtttagttctgcgaatgaatacttctgggttagttgacatagttcattctcctttatttgtagggccatagtatcatggcccgtaaggaaagtaaactactttttaatatttttcttctggacagaacactgcacggcaagcccacatagaagcttccttcagtttctgttttgctgtacgaatctgggcaatacgttcgtatgcttcatcgagtacctgcttaggttcattgactgacacttggtaattaattaatgcctcttcttcttcaagagcagtaaagataagaccaagacggacttctgcgtctttgatagcattcactttaccaatcttttcatcggtatgtggcttatatccctttaatatcttcaattgacattatagtgcctctgtgaaagtacgagcgataacgtcgcgctgctgttccggcgtcagggagttgaagcgtaccgcgtagccagaaacacgaatggtcagctgcgaatatttttccggatgctcaaccgcgtccagcagggtttcgcgacgcagcacgttaacgttcaggtgctgaccgccttcaatttttaccgttggctggtattcaatttctacttcacgggccttgtatccgtaaaaagtttcagcatccgtaatagtatcttctttaagaacttttgaaacgattactcgtgcgtcatcaccatcttcaatgtaaatagtgcctttaagttcgccttcaagaatttggtatgctttcatatttccccttaattagattctttattccaaccatgcatatatgcagtaactacactcattttattccattcgtctgaatgaaacttcgcagctgcttctagataagttattttatcttcatgataagtaacttcttcgtcagtttctttatcgtactctacaatttcaataggctcgtcaactccatatccacgagtgcctatatacgttgtagcttcttcccactgttttgtggcttcattccaagttccattctgatgggcttcatagaaatcttgctcaccagaattactgaactattcacagaagctctcaactaaatgtggaggacaccttataacaatttcagccattgcattgttttctcttgaatgcgttggtcatatgtgattaagcttgaactaatcacgcctttgagcttgccggatataaactcaattctaaaattaggatagcgattcatccatttcgtgttaggagcattagaaatgaattctgcgcctttgaacggaccagacagaaacttgtagcgcttgtactcaagcaggttgccagccgtaaccattgttattaattgcttcatatcggcaaatcctgtattttccatcactgtaatcatatcaacaatttctgtctgtgtcatcattgcattcctatcacgaaaaataaaggtaaggtatcattaggcatagaccatctgatagcttcctggtacatatcatagaacttcatcatatcgggaactttcattggttcttcaatgataattaatgctcttccaaactttcttcctctaaacttataagaggaatcattggatagaaattccctgattgtcatcggaacaattgatttagctatctcgttagccggtaatttattaattaaatgcgatgaattatattctcgtagaataccttccatcaattcagatgattgtgtgtatcgagtagataagattataaccgaaccatcttcaagcaaccaatcggtagcgaattgacataaggctgtggtctttccggtttgtcttccaccgtctagacgaagggtaccgtactctcgcataaggcaagacggttcataaaaactgtagttgggattattcaatcgtctgtctgcagcgtctctgaaagcatgcatcagggtcaaataaatgggagttaagtgtttcattttagattccagttaaaggggccattccttggcacatgtttaatccatcgacacactatgtaaaccccttaccgcattgcgctcgaccttattacaggtaggaaaagctacttcactcagaggactcgacgttcatgaggagaggtcgtgttcggctttattaggaattagttttaattacgggctgcattagcaacggcgtaagcgtactgaacattagcgtctttaaacgtacctttagtggtatctaaatctgccttaaatccgcctttagtcataatctcggcgaattctttacggaaggccatggcgtcaagatttttccaggctgccttatgcttggcgaattcgaggcctgcaaagttgacagccttagccaatttattgtcaataacccatttacctgctttaggtacaaataccgggcctttctgtttagagaatagttttaaattccaacggcgaaggtctgcatcggctttaacaaaagctgcgtctaagttactagcaacaacatcttgaatatggccaaatttaagtccatcagcttcaatatttaggtcgttacgccagcgaagtccttcccaggcgaaggctttaaagtctgaagcctttgtagctaaataccgctcaataggagctgttttagggtcaaagccgtttcctcggtaggtccactcatctttattaatgccttggacctttcctacagaagcttcagtgataaattctttatatgttttcattttatatcctttaagttaatacgtgttttaataaggctactataccacattaccgtctcaatgtaaactacttaattgatttagcgtaacgaatagcgccacgatcgtttacgaacgcaattttgccattacgcatgtacatggtaacagtacgttggtaaccgttagaagttttgccagactgataacctactaatgcaaagttatcttcaccaggtttgttctgcttagacttaatacgctcatgaccaagtgccattaaggagcgtgcatcgccagatgctactgccttacgagaagattcatcttcaaccgaagagacaaaatcatcgaatgaatcaaacttagcatggctcttattatataacttgccgtctactacgtagttatatccaacaacgtccatttcaatttctgtaccatcttctaacgtggcggtcatcttctgacctttttttaaatttcagaagattacttccaacagattcagtcattacgccaactgttgctaaacgggattcatttaaaaattctttataagttttcatttattttccttgataagcggcccaagttccggtccgcatagtttcaattacacgacgagcacgattaggtgtctgacgataccaacgtgaatttgcaagttccttggcagcagcttcccactttttagcgagtaataacttcattgaagctgggaacccggctacaccagacacacccatttggaataccatgttaatcagagcagctctacgaacatcatctaatacattatataccgggtttaatgtagcattagcaacaatacctttaattgccttctcaacatctttggcaaaaattacttctgcctcagcctgagtaatttggccacctgtagaacgacctactagcttgtccaggttagaaatagccaaagattttgacgggtctttagtcagtaagtggccaataccaatagtccaatacccttcggtatctttataaattttgctatcgtatccttcatcaatacgcagcatgccaaaaatatccataaggacctcctattaattataggagtatttatttggccctgcacttggctatgaataattcaaggctacacttctcgtatggcgtccatttacctttccaccacacataatctcttctatcgtcctctggaatttcattaaatcctggacataacttttctgccatgtaatacgacgattttgcatactcgctatcactgaagacataccgtgacttcattagtgtacgtgacaacttatctcgaggatgaaatatgctaatccatcttccgtcacgaacaaatcgtagttcatgcttataaatgtgtggaatgcctaattcaatagcttcttccataataacctcaccgagatgtgctatacatctgtgtcatgattttatacaaacttggtcccatcacatatttccattgagaaggtttaattaaagcaaatgcatcgatttccgggaaagaaattccattttcatctttatggtaagctgtacaacggcaatttctgaacatttctgggctcacagggagcgtatatccaaacagatgaatatccttattgctggcataatcatgtcgtccaaggtcatataaaaggtcttggtcaaactcggtaaatccagtctcttccttgcattcgcgaatagcagcttcttcatggtaaactcgaacgtagtactcttcaacagcaggccaatctttgcgaacgtgtttaatcaaatctttcagttcacgggtttctgctacgttgaacactgcattctcatgttcacctttaatccaaatcgcgcgataacggtcaggagtaccgtattgattataaccacgttcaatttggataaagttgaatttagacattttattctccgttactctgttttgttttgatgtagctatagtaaccgagttgactagcgttgtaaacaactttgtgcacaaattttcaaataattttagggaatctggaaggactttctggaggatagaatggatttatacagcttgggatacagaaatgcccagacgacctctagaaggtatctgggctataatttcggtattatcgtatactaaaaagccccgtccgaagacagggctctgagaatcgacagcatcacctactggcagatgacctgcgaaattcattcctttggactcggaggcatcagtctcatccaaagaagtatagcgtcaggaggttatgcttgcgacagggaacaaccgactagcggcaatggacgaaccattctcttctatctgacgactcaacgagggcatacgcaagtttcccttcgaatttggtgccgattgcaggagtcgaacccgcgacatcttcattacaagtgaagcgctctaccagctgagctaaatcggcgtgatttaaatttggtacccctaccaggactcgaacccggactaccgaccttagaacgatcgtgtgctaatccattacactataagggcaattaatttttcaacaaacgtttcattataaacattcgcatagtgaatttcatgtattttccatcctgcgttagatattaaatcatgtctttctttgtaatagttatttaatatacctaatttaggatcagaataatgctgatttccattaacttcaattgctatcattttatcaggaatagcaatatctatagaaaaacctctatctttaattggttgatattcttctataaatgaaatacctaagtcaattaagatttctttaagatgctcgcatggctttgatttaaatttatcatttcttttccatgggtgtttttctggattttctaatatccatttcttgcgagcattagaaattttaatacattcttcttttggttttattcttcctttagaagctatactcagtttttgtttagtttcatccgatacagtaaaagtataacctaaatttttagcttttacatactgatttaagttaccgtttttaattcgggcagaattcattgctgccactgattcttttccgtaattctttcttttcggatttaattcacaccatctagagtgattagccatccagcctttaggtttatcagatgtgtcaaattctttatgacaatgtttgcaaatactcattccaatctcctacaatataggagtatttataattggatagagcacaatttggtgcgtcgaacgagactcgaactcgtacgggtttaatcccgggagattttaagtctcctttgtctaccaattccaacatcgacgcaaatatttgttcaggcaggacttgaacctgcacgactgattccgtcagcgatttaccaccgtcgccagcatatgatgcaatatgcgagctcaaaaggtgtccgtcaccatgtctaccgatttcaccactgaacaagataattatattactgattatttatagcatttctcaaacgataaagttgattacagaattcacgttcagtcaaaatcgtttcagaaattttgtttttgcccatactgtgagtgagcgtagcattccgggtagcagccaaagcttttctgaatccttcatttttactaagtgcatcatatgctcctgttagtaaattctgatacgcttctgaggcacggtgaataggaacacctttccaataaagcgtttgtgttggccaccaacgtttcttcttacctttaaacttagcggactttccgactagtgtacatacatgtgcttgcatttcaggcgaagaaaatttgagggattgcaagaatccctccattgatgcgcattctacgccatcatagataaatttatgaggagcgaaattactcaaagcacatgatggatatgaactgcctgaaccaatatccattacttttccttcacgtatttcaaccaatcaacttttaatgggctttctttctgcttatacgtaattccaacatggaatgcaaccggagcatcaggaatacgaatttcttcttcaatgttgaagatttctactttctcaaatactcgcatgaaatcatagtcatattcaattggattacccaaccaagcctgaatagcatacataacttcatttgaacaagaatagtggttatctaaataagcatcaaactcttcgtctgaacaatcatatgcaggaacaccaacgccaaagaatttcttggaaaattcaggagttacatacttctgttcagtatgaagcttttcaagaattgcctcatggttgtaatcattatttccaaggcattcaccacgccggccacgagaagaaaaccattcaagaacatgaattacttgattaatctcttctttttctaagccataaaccatttgggtagaataccggtcggcatcattttcccaagtggtaattgccattgctaagcctttaggaataacttgtccaaatttaatatgcatttcaatttcctcagttgataatttggtgaccctggcaaagactcgaacatgcaaccaatcccttatgaggggaacgctctaccaattgagctacagggcctttatagaaatcttacgacttttataaaagccctccgaagagggcgccttgtcgggcttatccacctgctaggcagaattactcacacataaaatcagctacttcccagaagtcatttttaactgctactttaaccaccggagaaatttcagatgttttaatagaaacaattacatcacctgcgacagtttctaccagaccaacgattttctcgctgcgagcaacaaatttactcaccggatgaaatttaccggtagcagcgaacatagcttcttggtcaacaatcagtgcgatacgtttcattctttttccttgtttgttttgatgtagtaataataacaggttattcttgtagcattaaatctcgaaaatcgttccgttttcccacattgttgcgaacataggagaaaccttaacgaatgatttgcttcgcattgcaacgtagtcgttatctactttagccaatcctgaagcaatatcagtaatacggccacacttcatagaaccgcgaccacctttattgtatgtgcgttctccgtagaaaacgatatcaccaacttgtacttctcggcctttagaatctttcatcatattttgcctgctgaattcgtttaaaatcgttaacaagttcttttgggcctgacacattgttaaatggaagaacttgacgtagtttacttactttacaaccagaatgataagcaataacttcttgaatatcacgctcactgaagtattcatatttaatcagtgaatcatatcggcatttaatccagacccacatacctttgcgttcatcaaatgcatatgcaaagtcagcgttaatcattaaatcccgtttagcacaagatgaaagccctaatgctaaattaaccggtccatccaaagacagcttcaccgtaatagcatttactttatttgcaacaccaataaaaatattcattctatttccttcgcttgtttttggccttcttgtcgtacacgagaacgtcctgctttatgcagtgattcgtaatatgctcgacgtctatcaatgttttctgtacgatatgctttcccgaaatgggatgttttgaagccgtaatatttcataatataattctcaatggcaagtgattggacggtatgcccggtctcgaaccgagtcacattgactttgcagaatccatgtgtttaatatatcacccatactcgatagcatatctgaacgagactgcaatcccgctactcagcttacgccatcttgtattgtgtcataccgataatttggtctccatagaatgactcgaacattcgacctctccatcccaaatggagcgctctaccaggctgagctatacggagtaattttgatttaaaattcttcttgcttgagtgtgacttacaccaatatgtttagcatatttagataattcgcctcgtttagaaaaatcatataatttagaaatttccattctgtaagctctttcatctgtactaactctagctaagtttaattcggatatctttttcttgaattcagccgaatggtgttttcctgtaaatccgcttggcttaccagccatattatctttccatgtaggtaaatccaaggatttcactgagtttgaaatctttttcttatgctcatctgataagggtttattagcacaagattttccaacttttgacatattagttcttcgttgctcggacaagatttcattattgcatatgtggtcccatccgccttcgccaccaagctttaagttatatgtgtcaggtcttttaataaattcttcatttactagctgtctttccgcattatacatatctttagcattatcaaaagtctcaagaatttctttttcaaaattttctttgccgtactttttaatagcacgctttaaatttttaccagaacccatgtatccatcttccaacttagaagtagaatgaactccaatataaaacttttgacttattttatttgtaattttataaagatagtaatgcatatcagttcctattaaaagaaccgagcgtctctcgacgagtcacaatttggagcatccaaagggaatcgaacccttatcaagtgagtggaagtcacctataatagccgttatacgatggatgcaaatttggcaggccctgaaggaatcgaaccctcatcactgggtttggagcccagcataatagccgttatactaagaacctgttatttggtgggagtaactggactcgaaccagtcaccgctcgattatcggtcgagagctctaccaaatgagctatactcccatggaaagctaatcatctaattgttgatgtaccactgctatgggcagcgtttaactttcataaatttggcggaggcaggactcgaacctgcgcgtgtcgggatatgagcccaacattctaccaactgaagttaccccgcatttatccgggttcttgaagtactaacaagtagcttgatgtagaacacgctaaagatataatcttacgaatatagagcttattccgtgggaacaaacagcttcgtcctcggcattatcttataggactcaaactcatcttcaagaactgccacgttcttatttggcggacctaacggggatcgaacccgtgctctctctcccgtgacaggggagtattttaaccaactaaactataggtccataattcgctttcagagatactctggcacgatgccgaagcaaaggggaacaggactctcatcaccttggtaccagatgaatcttgtttagcactctgttctaagatgtatccctgaaagcgaactttcaacaccgtaagaaattataacatgaacaagcattaagcaggatgaaatcatactccttaatacaaacgccatgccagggatttctgtgccgacgattttatcagaacgtcttctgacttcttcatttggcggcccgagaaagacttgaactttcaaccatccacttaacgggcggacgctctaccaattgagctatcgagccgaattaatctttttctctttaaagagttttattatactatttatatcaccctttatccattcgccttcagcatttaaagacttatgataagagaactcttcctttatacgattttctgaaaaataatagcattcaagcttgtaatctctgagtggagaatatgtttgataagaatttaatctatcataaacgtccacagatgaacctattttataccatcctttaaaagcaggattagtaatacaataaacaaatccttcctttattcctttagacgaatttccatttctaaaatatttaacacgtaataaagataatttagtaaaattgatttgtcgcgaaatcattttatctgctttacgactgttttcatctaaatactgtattttaaaattaggatgaacatatttaaaataaatgtatcttgcaaattcgtcgcttattggaaaatcaataccaaagatgtgttcttcatttaagaatctttggtatttttcaattatctcagctttattcaacttgaccatccccaacctttgccgggtccatcataatgtatacatatgtcaggagaaatagtatattcatatacattactgaatactgcaatgctttttccaaaatcagtaaaacaaaattgctctcctggtgaccaaacatcttcaaacaagataatactcaaaactgaggaaaattcatctaagtcttcatctgttaattcgttatcgcatagtttaatataaaattcttcttcagcaatagctacaatgtgtaataataaatcgcctgtagacattataattcttactaactgtccgctaaaacatccgcgatttaactcagatggagttgtgtaattaaatgcaagctcagcaatatcaggattttcccaagttttattgttaaaatccattaaaattggttctatcatatttttctcactctgtactgtagttgatagattaataataacaaagaaaacctaaagcatattacacaatcggtgagctctttgatttaaccaggaatacccgatgtggtgaatccatatgagagagcaatacccggtgctcaggaattggacttgtatggaaaggaaccacacgataacctttaggagtaaatcctagcaaaataccaacgcttgctgcagaaagtgacccaccacagtagtatgatactaaatcaccaggctggatttcattgtcaagagaatcggttttggtatgcttaggcgtaactaaatcattaggaattggaacgccttgtgcatcatagtattcatgggcaagaagcttataattctcttgatagaaagtattaaatgcagctctgatattcatcacaatttcctcacaattaatctttgtatgcttcagttgaacctttagcaacagtctcaaatcgggaattcagtatctcaaaatagtcttgatacgttccctggagggcttcatagcattcttctaccgtagagtagacacctctgatttggtcagagccaggagcaggataataattagaccaagttaaaagtgcgtacattacttacgtttccagctgtagtgagccaaaataagaagcactgcaatagcaagtagtgatgaatgcagtgctgccagtagtgcacctagtcctacacccaaagtaacataatcatacttagttacttcttcacggtttaaatcatagtttttgatgaaccactgcttaatctttttcatgtgctattttatccattatgaaagaaatgatacccattagaaatgcaacgcttaatactgatactgtttcaggaagagacataaaggctgcaccgataatgccaaaacctaatgctcccatgcagattgttgatgcaacatttctaattaattcacaacgtttcattttattctcctcaagttgatagggttatagtatcactactacaacccgttgtaaacaactttgtgaaataaattcctatttcaaatcttctgaccagtccagttttagtggctcttggtactctctgtcaagcactaccggcacttgaacttcaccctcgaagtgagctggacctacattgtagctgagagtaatgtgcggtgagtaatctgggaaatcgtgagttgctcccaaagctcttgcatattggtgacggaattttaagtattctgaatctagcttaagaactagcgtacgtccgtcttgtgtgtcccatacttcaagtttacctgatgtagcaacttcaaaacttcctgaagcacaaacgtatggaacatgaactcttgaatagcatatcgtcgtatgaatcttatgacgaggtacaggattagggaccttcaactcacgctgaaggtcctcaatagcatcaagagttttctcagagaatttagcagctacatatagaccagtgctaaaatcgctgaagttcattaggcatcagcttcttcagtggtttcttctgcgaactgtgcttcgatttttgcaaccaggtcatcaagtttaacctgaccgtcttcactgatttcaacgccggacacagcaatcagtttctgtagtacttcttcatactgtgcacgcagagcggacagaccttggatggtttcagacaggtcaaatacacgaactttcagagtatcgacttgggcttgcagttgttcagtagtcatttttgaattcctaatatagtgttgatttttgaataaagttcttctagagaaccgtcgttagttattacgatatcgccttcgcgaatcggaagtccacgctctgtgacgtgagtatcttttttagaaccttcttgctcagggcgaactacatgaataacagtagcacccatcgccctggctacatcaagttcatggtcttggcgggtatctgggacaatgaaataatcataatcaccaaaagtatcagccataaccaaagtgaatcgtttcacccaatacatgcgatcgagcttatcacagacaatgtcagtcccaagggtctgcatgagacgacgaattgaccatggctcaacaggtttatttattacaacttgacggatgacttccatcgtatcgccgtcaagaattttacgcttgctatcataaaccaccccaggtaaaggcaaatcatgatggacatattcaatagcattcgccataatacgaatcacgtctttagtagacagatttaaatcctgctcacgatcgtaatcaataccttcaatcattgaccgagtaatgcgcggaaactcacgagacgtatcgcgataccactcagtaagcattgcatcagccaacgcatctttaattggacccgctaactgatgctttgttgcattgtagttatccataatgtaatcagcagtagtgtctttgccactgcgttttttaccaatcaaaaataaaagcttcaaattattacctcatagaaggatgcattcccataactttctgttgatactgggattcgcgagtatcattgacagaaggtctaccagtaattattataccatctttttcaacttcaatgtatttgtactgcaaagttgctacacataccattgctgggtcggattcttcggttaaagaatactcaatttcagataaatcactcacccaacctccgatgtagcggacagttaatactatatcatgtttatcgttatcaagaacatgcattaaaaccgcaccaggaaatccttcaccgccgttattccatccagacttgtctcggtcaatgtagttttgacagcttaacatccatttgtacatttgtacccatgaatcaagattttcatctactaaaaatctaacaggaacagcgtcaaactcaaaagtagacccaggcaatttagcacgatgcatgccttgaggcgaacctacagtatcagtagcaggaatatgaattccaggaactacggctgtttgaagattagctttaaacgcttgggtgaggcccccgtcagggacctctaatataaagttagttgtgttagtttgattaaacagtccagtagacattatgatttccatacagaagtagcagagtagcgtttgcctttcgacatgaactgctgcagtggtaacatgactacattcgcccaatcagccggttttatctcaattaaagcaccctttatattaccaggaatatatgctttaatcattttgtcagcgccagcaaatcctttaacttggctccagtttatctttaatctggtcttattagatatcactggcgtattagcatactgtttaagaagttcttctaaaaactgctgacgagcctttggcggaatgtagtgaaggtttaacccatacatcaatgtggttgtaccttgctttccaagaccaagataaactatcaaaggaaatttatcccagaatggaagagtgtctttgtgcttagcgtcatatatgtaagcatatagctttccaggttgaggcttggttacagaatgaccacgtatatttttctttatagtttctgcaaaccatttagcagatttattgtttactgctgcgccttcattacgaattttatctttgatagagcttcgaaatgaatttaccatcacaagagcacgctcctgtttggtcattttgttagcaggttttttctcaatttctgctactttaattgccgttttaattcttgatgcatgacgagccattgctttactgaacgtagcaggatttattcctttgctttcagcgaatgatttagacgtcatgccttttttacgagcagcagagtattcaactcctaatgctacccattgattttcactacgggatttagctttaggcgattctgcagcttcagtgataaattcaaatatagccatcagcctttccatcctaattttttaagtgaatcttcggtaattaacctaaattctatacccattttactggcagtagcttgagctgctttccacttatcaacgtttacagaccaagtgtaaatttcatcaatgtaccgtttcttcgctgatgtcgtcaactttgtgggtttgaccggaggtctagtttctttctttggcttaacttcaaaaaagaactgttgaccattagaaaacttagcccagaaatccatgaaataccggcgtttctttccatctgcattactaaagtatggaatgactacctcttcgctgttccattggactacatctggatgattgtcaagccaacgcatcatgtactgttcccatgtagaacgataagtaatctttctaaagtcacctttatatttgtggagattctgcggcatgaatttgccagaatatgccatagtggcctccttataaatactgttattaatatttataagaggataaact

SEQ ID NO: 37 - DNA, 157764 bp, unidentified
  source 1..157764: mol_type = genomic DNA
ttaacgataaagcccttcaacgtcaatggatttgtgttgacggttatattcagtggtgtagtcgtctaacaccagatattcacagcagcgaattttactggacttgtagtcatcagtgatcgacacgatgtccttcgggttcagcttacaacgaacaacgcgctggcccaagtggccgaagcattgcttcagatatgccagcgagcagacgtgcagcccataggagcacaggtctttgttgtcatcgttaacgaaggaacgcgccatgcgtacaatcgttcccggagtgttgtcgatcgtaccagagtgcttgtccatgtaattgccacggaccgacttgtacagaatgatgtcaccgtcttcggcaatctcaatatccgagtatgccatgaattcatagatgcggccagactgtaccagggacgaactcgggttctggaacatcttatccaggaagttcgtcaggcgctgcatgttgctgtaatcaccacgcagcatcagtgtcaggatacgcttggcgacgctcgtgccagtgatatcatgaccggaccaacgaacacggttattgctgatgtcaaccaggcctgtcgcaaatttcttaatcgcttcgcgcggcttcatcaacgtatacgccagtttgatgtcacgagatttaatcgcttcaacgattcggtcatacgactggtggctggtcgtgatcgtttccggtttgccatcgatgacaataacgacgctctccggcaggatcatgatctgatgttcgttcaggaacacactcagctctttatcgccgaattcagccttggtctgtttgtcaccgatttgctgcgtttctttcaattttactttgaaagtcacggatgacagcgccagacgcagggtgcgaccgaggatgctgtcgtaataaccaacccggcggcgggcgtccatggagccgcgcatcggatacgtgtcttcgtcaggtaaaataaccgtgatctcagaagtctcacctttgtaaccatcaaccagggcagatgccacttcggccagcgcaacgattttatcgccgtcatttttagaattaaatttgtcggaagactcagacggtttcagctgatcgcgcgggatcatagctgctttgatcccagcataactgctgtcgtctgtataacgcaaacacaggaattggccgtggttctccatgaacttgccgacataccactcttcgtcgtctttttcatatacagccacgccgccttccaggacttcgaattctttcgtggcgtccgattctttaatcggtgaaatgacggtgatgttgtttgcttgtttgatgatacggaccatcagcgcacgggcgatagttttggggctgacgccataagccgatgccagggtggtgttgctttccccggcctggctctgagactggatcagttcgatctgttcggttgtcagcgatttcagagaagccgggtcaacgcccagctcctggtcggacacacgctgtaccattgagcgaggaacgcccaattcgttagcgatagaattctggcttttgccatccttcaacatccgcaaaatacttttttcggtagcagtcatcttgtagttcccactttgtgttagacggggctattatgccccgagaatacgttttgaaatagcggcgaagaaaccctctttgtcttcttcaatcgggttctgagccacaggcgtatacgtcgccatcagatgttttaacaagttatggcaatcgacgcgataccggttctttttcttttgggtctgcgaaatagaacgtgtccagctgatttcgcaataaccgttgtttttcagcaattcattgatgctggagaacaattgaatcatacgcgcctgcccatggcggtattggtcaaagttctttttgatactaacatggaaatttaatttttccatcgcctcgttaagatctttgacgccagataatcctttcttgttcttactgatttccttcagataatcccattcagtttccggtatcaattcaatattattcttatccagctgggttattttatccttcagataagcaaacttttctgggataccttcgtgagatttggccagaagtgactccgcatacgggatacggtttatgatacaacgagtttgctttcttaatgctaacagttcccgggcattcttagatttgaaatacggcatatggcgtttcaacaacatttcaaataccgcatcaattggcacgaacacttccgggaactttttcatcatcggaaccgatttacggcgggcaaggatgactttcttatggaagttcatgaactcaaatattttgttcccctcatcgtccatgggagtgttgtgcatacattccaaaatgctccgggcaacgtattcattaacacgttttccacgaatatcatggatgctgttagttcctgatatctcaatataaacaatttgcttaccagaatcaatgatactggagatatcttcagcagataattctctatccttatagaaactgaaacggaacccttcgtattcaaacatccctggatctttttcgaccgggggcttcacatactgcatatcatgcatgaaataaacttcacttggcacgagaatttccgaaataacttcataaaacttatcggcaaataccaaatggtcaatagttgtctcttgtttaccaacccaagattcaaaataggattgaagctcttcgtgattcttgtatgcgcctttatggttttgcaataaattgcgattggtcagtaaagaatcattgggcttaacaacgatgacaacatcatgattatttcgcgccgtcctgattttcagattacgggcgcggctggagttatcgataataatagcaacagattttttctcaccaacccaaccataaacgtcattcagcatgagtgaatccttggattcaatatacccggcatcccaatatatttcaaggtaataaggattcccggcagtacggaatggagcgtcaacatcgatgttacgttctatatcaggggtgccgttgtaaacatatttccctttgtagaagcgggtatcagccgggaagtcccgctccatcattttgcggaaaccgctaccgaacatgttggtgaattcgtctttcttcatatacaacgccagcgggcctttgctggccgccaggttgagttcggaaatcttttcctgcataattttattcgccactttcttgaactggcgattcagggtttcgcgagtgtactcatcgtaagacaagtcttcacgggatggtgggacattaagctcaccgagttcaaagaaggtataggacgtcgggaacttttccagaatagaagaaacgtcttgttccagttgttccagatcaatagggtatgacactccgcccatgaccgcatagtgggtattccccgtccccttcggctggatataggtattccccacccggttgttaaaactgatgtcttcccaatcgaagttgtatgagtgattcgtgacttttgggcgctcgttgggcttcataactttgccaagacggatcagctcttcttcaaacgcacggaaacggctgttcttgaccgggactttcacagacaaaccattccattcatctgtgtcttccggcgcgggttcgcgggtttctacgtttttagtcaccaggtcaacagttgggatacggttcccgttcagatacatcaggaagcgatagatcttcccttcatagcgggattcaacagtgaatgaatccgacacagagaagggtgatttggaacccagaccgaacgcgccgatctggccatcatcgtcttctttggtactgttgaacaaagtggtataaagcccaggggaacggatgatttcgccatcttgggttttaaagaccaattggccaccataatacgaagagaaatcgggtacacccaggacttcagaaccttctgggatttcgtcttctttgacgaccatgttgcccgacagaagcacttcatcttcacgggccaaaataggttcacccatgatctgttccagcgaaaggccgataccccagtctttgatttccagccatggctcgtaatcgtccgggagatggacttctacgggaatgttagaaggcgccagatacttactgtgcagttggggcatcggggacagagaggcataatgagacggcatccagcgctgtaaacggttacgcatgttgtgggcgtcaatcgcattacaaacggtctcacgaagcgccgccgcttctttataacgataaaggctggagaacaacgtttcaaataacttatcggtcattttgacgttgaacacattaccagatatagatgatgaagagcggacgaagtgctctgacttgcgcattttcataacgaagaagtcctatcagtttcaaagggattacacagggatatgatacgtggcgacagttcaattgaaaaagccccttctcaggggctttagttcacattattaaacgagtgatgctttgaagtcaaaggtcgggcgcgtcgcccccggttccagaatttcttccagataaccgacgtattgtttgacaactacagtcggctcggcacgattgggcttggttgcactcagatccagaaggctggaagtcacctgctctacaacagtgcgcttgatctcaaaatggtagcggctcccgaaggcggcgatctcgacttcattaattttgaagtcagacagttcactgctgttcaacgtaccgatattcaattgtgagcgcagatgctcaacaatgttagaataaatgtactgcggcgtgatcagctgttcaatagaactcataatatatcctctaaatttcgggttcaggtttacttaatcgagcgagttcggctcgaagatacagaatttcgtcggccatctgtttcccttcaccaaacatgacatgacactttaccttcctcggctccccttcagatatttcgaggagccgttcttctgttaaggtgtcatcactcatttgcgtttccttttgttctttccatgcgttttggctttcttcggtcgtttcaccgatggtcgaccatggcctggcgttcccggccctgaattgttggaataccaaatatcatcaccgcgatggcgtgattcctgataactacgcgccaatgcttgttctgcactgataacagcaccagccatagcaatggcaactaatgcctttttggaacccattataattctcctttggcggcataggacaatgccttgacgatcatcacagccaactgcatagaaccatagtcaaaatcacgttccaccaatgctctgatttcatcacgagattggacttctggacaatttttgctctgccgacgttcttcctggtcgatcagatcgcgaagcatcagaccagtaaaagaatattcgtcaaagttttccagatattcctggatacccgatttcggtggattagtttgtttgacttctggtattttagactcagacgttttcatggaacttctgagtttatagatcgtggtgctggcaacttctcgccctttgttcaaggcagtgaagtcgacattttggccccaagcgttcttcaccggatttgaacaacattgaccgaacaaatcagaccaaccatcatccagtgccaggagcgattgtaccaacgcctcataagttggttcatcagattggctcatttcattacattgggcaacgatgttgtcaacgccccaaagaggattcaacaattccatcaatttatctgattgctctttagataattggatgccattaatcatagatttgatgaacttgtcgtacgcctttacagtatcaacaagctgctggtaagtcggtttggtctgcgagttcattttctttttcctttgttgcgtgccttactggccaaacgtttattttgtgctgccccgcgcaggcggggaggcttttgataacgagcatctttcatcatctgacgctcgtctctggatgtttcaataaaatcattgtcatctaatttgcgccttgatttcaggctgttgataagctgcttcacatcaaattcagaacagatttcatccaaaatcacgatgcgtttgtcgttctcttcacgacgtgccaattcacgagccgacatatgatcttcgatcgaaatctgctttatttcccattccggatgaagatcttgtaatgcggccttcatgataatactgtggtgaccgcccccgatgatcacgatctttttgggttctgacatgattttgctccaaagaaaagggatagagtaataataccctatccctgtttattgaagaattaagtctattcagcttgcgtgtagttcaaatcgccccgcagatcctgaataggctggccgccaactgccatgatatagatggtgttgatagtttcgaaccacgtcagttcgttaacgtctttggtgtacggcgtcaccggaatagaagttttgacttcgttcgtttcagtcagcgggtgtgctccaaccagagtaaggaaagcgcagcgcccggtcggatggataaccccttctttgaacattacgatctttttgcgatggttatccgcttcacccagacagacaaccagatgatgaatcatctctggccgggtcagcaaagtatctcctttgatgattccctgcttaaccgccgaaataacgatttcgtccaggagagcctgttgttgatccagactcaatgattcggtgagtctcacgctgttgatgttaatggccatgatatcaccctttgaagttaatcggagcctgaacgccagattcaaaagctgcctgggtacggctatcacttacaacctggcaggtcttttccagatctaggcgcgggaaaccaaacattccggccacgatattgcccgggaactgctggagccgggtctcatacagctggcacgcatcgagttttttggtctggctaatacggaattcatcgcggcccgcgctgattacgatctgaatttctttgtacagggacgaatcaaactggatgttctgttcctggatccattgcatcaccgctttggaaccgtcggcgccatagcggccttcaaatgttcccttgatgacttccttcaacccgttcttgtacatgtccgggattcgcgccgtttcctgcactttcagggtataagaactcagatagttctccgagtccttgttgaacttcttaacattgttctccagcgtgttgaagccgttgaacgtgctgataagaaacccggcgatgattgcgatcaaaccaacggtagcaccgacgacgataagagaaggactgatactttttgacatttttgtagcctcttgtttagaatgggaaacgacgatttagactaaaattatatggcccagcgccaagatagaataatacaccgaacggcacacaaccgagtaaagacacgatcagggcttcccaggtcttcaactcacgccatttcagataatccatctccttcatagacacccggttgtagcccttgctgatattggtagcgacttcttggaagactgctatccccatgggctgtccagtaagggataatccattgcgggaatgcaattccatgttgttcatgccatctgcaaaagaagtgctcttgccccaatttatcttcatatccttggtgatatcggtaacaacgatgacgtcattcttcttgccgcccgcccatgcatacaccagcccctggaaatattcaatcggctgacctgaagttatcacccaaacgatgttcacctgacgctcggcacccagagttttcagaacgccgttcaaataatcattccagtaaccgacaggaagattcaaaccggacatgttcaaaacccggttgacacgatagtaatcatagacctttgggtacgccgggatgtaatctttgaacttctgggcaaattgttcatccgaacgggagaataatgaatccctgtttccaagaacgtagttctgatacggatgatcttgtgcagctggttccccgaccttcacctgtgcccagcgcggcggctgacgcaaaccttgtcggtctatacgcttaatggtcagatcaccgacggtcgtttgaacatcccagtcaacgtcgtaatcatgctcgtcacaatagatcgggacacaggactggttgcctttactatccgttgaacatgtctgaccacattgatactggtgctcacacgagaccttttctcgagtcttacccgtaacataaccattaaggatttccacgtcagcagcactccccaaggagaatgctgcgtatgcacccgcttgtatcaggcaagacaaaccaaccccgataagggtcgtatagaccgtctccttaacgttgtggtcggcctggtgcctgacaatgaaagcaaccgccatcgccaatggcaggatgaaaaagagatagatcataatacaccacccacgagttgggccttcgtcatacccaacagttgttctttgtgtttttcatccgcgccgttggcgaccaagagcgcccaacgttcttcatggtacttcgggtccatggcttcatcaaacgataggtgatggcgaaacatgatggttgccactgaatggagaacgtgcgccgtagcccgctgtaacgtccttgggcacgtgatgagatctgtgtgagtcataattttgatccttagcgataaaaagggaacgggccaaatataagcccattcccattattgaagaaactagtattgctcagttatttcttcatcagtgacatcagattaacgctcttcccgacaggggcggtctcctgtttgcgttcaatacgctcttcaggttcccaacgtgttcccttctgtagatgccagatgtggagtggaacgcccgtctcaaagaacacaggcatcttccatttctggacgcctgggacgtgccctgcgggagccttctcacataacagggtatctggtagccaaagtgaacgcgcctcccagagtgccgcgcaggagtactccggccaaatgcgttccatgtagtcgatttcatcccaggtacgctccgcatcccacccgatataacgagtgttcttcagacggaagaatttcttcaaccaacacgcgccagaagtctcaaagttcagacggttgatgaatgtcaggtgaccgaattcttcaacgcattcatggaatgccttttccaaatcggcttccaggatgtcacactcttcatcggtaataggacagccatcgatctttttcttcccgtgtttggtcacccaatcatcacggttagaaagaaacgccgcgccattgcgattcgattcactgccttcacggtcacgcagcatgaagccagggacatcgatttcccacatgttaccgaacaccatgttcagggcttccaggaagttccaggcgctcaggcggccgaagtatttccaggacatcgccgtgtcccacaactcagtaaactggtcttccttcatggtgcattccagcatccaacggaaagaatccatctgagttttgccgcccagccaatccacataggattgaacacatgggatcatcttggacttgcggtagcggcaatcagtatcgaagcgcatgcgttcaaagttcagattataccagtccgagaagcgctgcatttcttctttggtctgaggaggaaccgggaactcagagtagattgtccacgggccgatcgcattatagcagcaaccccaaaggaacgccatccagatcttgcgctcgatcttttccaggttggtgaggccttctgtgacttcaatagcataatccatcagacgcatctgctggttgtgctcttcagtataggacagcgcttcgacccacgccttgagcagatacatccggttctcaggcttgcggtagtcaaccttcagatcaatcgggtacttccattgctcaggggctttatacccctgcggcattttagataaatgtgccatacatcaatccttttcgccgacggaacttgaaagttcttcatctccaggatgaggctgaactggctccagttgcacttgatctgcggtgaccgggccgaatgcagagttccagatatcgacaaagcgtttgtcagaagtcacaacccacatgcgcttggctttattggaacggtcagcaatgaacgcctgggcattggcgttggtacggacgagaccgacctggcgccactgaccaaaatctttagacgccgggttagtgttcagctgaaactgtgggattacccggttgtcttccgggtaataacggacagcattgatcatcttggcatcgcccttataatcaatagcgatagccacggcatcgcggggaatcaaaattttcatttcatttcctttaaaaataatttgtagacaacaggtataaagaacgataagaagccgaaccagtaaaccacattcatggttttcttttctgcttctgacagatcaatgaaaccataatgatacactatcatggttaataatgaggctaaacaagtgatcgccccgaccaataaaatagcatccaaccacttgctgttcatctttatttcctcaacatcatagccagcacgttagaacttttggacagctgtttcttttcatcagccgtcttcttgacaacctggcggcgggtagccttttctggtacgcgatgcgccagcgggtctgaaccaccaacttcacgggtcattggatggtcttcgcaatacttatagaattctttgaagacgaacccagcatcacggacttcattgatgatcatgtgatgaatggcattaccaatgacccacagcggtgcatcgaatggcaattgggcaacttcgctgccaacgccgttctttttgtagaggacgtcctggccgctgtatgaatctacaacaacttcccaacccgccgccaccatttcagatttagacttttcaaattctttctgataagactcattccgagtccagcccgaatccccggcttctttaccagaacgcccacggatacgagcatcatattgataacgatccggatacgtgaagtacaacagcgccagttgctcaataggataattggcaaacatccattctggacgccatttatcagacagcatcagcggttcaccctcacagaccagcgtatatcccgcgctgagatgttctttgaccagttcgcgggcgatatcaccagaacctgtcgcggcatggatagcgtccatcgaggtccacgaggcaagaccggatttgtttgacgcagtatactggccgacaaacattaatttcagttcatcaaaggccagaccaaacaggcgcgttttatcgccgatggtataagtgacctcgcgcggctcaaggcgagtacgcagccattctatgaactgtaccacacgagtacccttgcccgtgccgcttgtgcctttgattacaatcagttttgacattagttgtcatcctcaatacgccagctcacgccaccaatccacggtgcccaaaagacagccacctgcggaataccgttttcttcaaactttactttatactggtcgtcaaagttatagaatatttcttcgtcatcaggagacatcccaatctcactcaagacacgcttcagttctttagccgctccaacagaggaaggattctcttgagaacggatgtagttgttgatatgaatgatgacgccatccatatcactatcaccggaacgtttgtcagggcattctaccactttcagcaattcgttagacacttcagactccttgacggacaaattgataatgtgcaaccaggcggtcaacgacttctgtaaaattctcacgcagatagtcgaagtggttgcggccttctactggtttaacatatatcatgttttctgaatccgaaagatccagtttttcataattcccctgaggaacgaagatgctgaaaacattgttccagatgcacgggtcgacatatttcggattgtcgtcaatcaaaacatcgccagcaaccatgtgcttttcatccgtgctgataaacccatcaaagatgttcgggaacttgccatacacgaactgacgtttgctgcgttcgtgctcaggttcacatttggtgacagcaacaaattccaccatttcaaacttcatgagcagcgcatcatgcaagttgttcaagaactctaccgcaccgggcaacggctgcatacgggagtacagatcaggttggcgccaaaagtccatcgggtcgcgtccgtttgacatataatgggtcttaccgccgatactgacatatgaatgagaccatgccggatgagcacgttcacgcatcaggattgccaaatcacccgcatggttcatataacattgcttggtgatcggctggaatttagcggggccaacaatcccatccgggagacttgcttgggcttccaggtttccgtcattaaaccatttgacccaaggcgatagactatcgaccattgtcagatcaacgtccaccaaaactcggtacaggcctccgacctttgagttcatatcgtatagacaagtcaggttgttcatttatcttcctccactttatcatatcctgtcgctttacaaccatcggcctggcagtcgccatacaggacaaccatggagtcttttacgaaagtggaacaatggtacagctccgttgttggatcgctgtcatcgtaattgcaaacggtctggatcgggccgggagtagtaccctggagggcggcatgtgctttaaccatgtcatccattttggtctgagcctggtcttgagtgaagtccggcccgctcaggtcaggaacatccagaagagtggaacacgccgtggtagagaatgccagagcgcataccagaaggatcttattgagtttcatcttaatcacctattctttgtcaaagggaaacaacaaggggaattatatccccctgtcggttattgaatcaacctttcttacccatcatcgccaatagatttactcgacgtttgtgagaccagccaacgaccgtcagtatagactggatcggttcgatgaatgacttctcaaatgccgtgttgtaatccacccacttcgccatatctaattcttcggggaagaactctggataggcgaaatagttctgaccgaacggattaccagctttcagcagaacaatgttgactttatcgccggattctattaacggtaaatcgagttcttcatgtttctctaccaggcggttgtagccgacgcatgccttcgcagcaaagtgcgccccagagataaaggatccgtcaggagccacgcacttctcgatgtcagatacacccgatgccttcgcaatatcatcgacgctcagtttcatgtactcatctttatacgtcttgatgaggtcttggacttcgctttccgtgcctaaaagaatgcgctcatagcacttgatgagacgttcacgacaccattctggtgttgttgatttacgcgcctcaagacctttgaatttgatcttcggcttctcatatttgatgccttcactgtcatagacagccatgcaatacatcttcttggcacgccatactgcagcagacgcaatgacttcacgctcccaaaccatgcgttgctcatagccattcatcgtattacacagcatctgtgcccattcattggtcttgggctgataattctccttgatccattggtcgatattatcaacaagtttgtggtggtcagtttctccttcccacaatttcttgacaaggcgctcaatacagatatagttcgagtccgtgtcccccgcgataacataatccaggccgctggtcccgcacaatccgttaagataatcgtcagtgtaacgcttgttccacttattgatcaactgccctgaagttgtaatcgcttccgcaatgttgaggttaaagtattctttaaaccagacgttagagattgcaccataacctgcgttcatcaagatcttcagaccttgctgtaacgtgtcttgggcaacgccaaggtcttcccatttgcgcatcacttcggacaggtgatcaaggtcgatgtttttgtgctcttcataccagtcttggtcaaagtagcgggatttcatcgcggattcaaggtggaagtcacccttagacatttccttacaccagcccgcccattgctcatacttcaggcccttggccttctcacctttacggtcagcgtaaatgccgcgcatgatctcagacaggaaggacattttctcattactgaagaactgaacgttcggtgtaaacgacacgttgtaacgcacgagggtttcaaaccggaattcacccagggcaaccagttcatctacaacctgtaggcgttcatcaaccgcgcggagcagtttgtcatgaagattcttcatatggcgacgtttatgcatcggcgtcgtcatatcgttcatcttagcagcaagctcttcacacatggcttcaatgatttcacgacgggtgtgtttatcgccgataatcgtttcaggcccaaggttgtactgctgaatgatgtgtgggtacagggagttcaagtcctctgagaagacccaataatagatccccggcgccacttccatgacatatgcgccttcaaagtttgtcggcccatcatagacgcgctggactttgggaacaatccccttttcgtacagcttgtaataacacatggccaaccacggggctaccgtgcccaagccgtcttcaaagttagatttggtgcgatacgccaggacaaacatcagctgaatgagacgcagtttttgttccagacgccagacgagtttgacgtccttgataccataccgggtatgcttacagtaatcattgaagtacagatcaaacagtgatttgctctcactgtaatccatcttcttctcaccgagttcgcaatacgcaatccagtccaaagaatatctctcacgtgtggtgtacgtgtgcttcttgtagacctgcaggtaatccaacataggacagccaacgaactgataagtcgtgatgtcgcccttcttatcccggatgatacgctttttgatcttaccccaaggactcaggcgattggtgtcggcttcacccaatacttgcatgcagcgttctaccaggtaggggctatcaaattgctcgatgttccagcctgtccagcagtcaaaggcccgcgcttcccagtaatcaacaaatgaccgcagcagatcttgttcggtggtgaactcttgatattctacttccagaccaccgatctcttcatcatttgggtcatatttgaatttatggcgatccttagaacacggcatcccccagaccatatatttgttattggtcagatcctggagctgaatgagcgtaatcgggaatgccgcattcatattctgagtaatcttaccattggcgtcaatgatggggaactggtcggtcacgttgttggagataaaggagccggggaaatgctcgcggacgaacgcatggttggccaagatacgtttatggaactggcggacacgcgccgcgctccctttgaacgtctgtagttctatcgtcgggtgcgggaatggacctttagtcatctgcccatcgacccaccctgcagagaacacttcgatatcaaggttggcaatatggatgttgttgtaatctggctgaattgtaccaggaaaactgtgggcgatgaattgataggcatagtcggtctgaccatatatcgccgcgccttctacatccttgtattcctccatatagttgtcggcgtcacgcatagacgcaaactttttagaaatcagaggttcgttcaacaggccgactttttcaacattagaataatcagccgtgggtaaatatagagtgggttcgaatttctttttgagcatgcggcggttgcccatgtcatctgcaattcgaactaacaggtcgttgccttgccgggcgacgttagtatagaaaacagtcattgtattctccaggttatccgtgccgttagcacgttcccataatttaaccgaggagggttcattgaccaaggagtttatatggcaatccccttagtaagcatgattcctggcgctttgaaacagctctggaatctgggaactgatttgattcaatataagcgggaaattgtaagcgccaaacacgatgtcaagttagaagcgatcaaatcgtcttccgactgggaactatctaagatcacagaagttggtggttcttggaaggatgagttctggactatcgttcttgcggtccccgcgatcctcgttatgttagctcctgttgtggaactgcttttgttccccggcgaatatcataaaggggatttcatcaaagcagtagtcggtggcatgcaagccctagataccgcgcctgattggtatactgcttcattattgacagcaattagtgcatcattcggtatcaaaggctacaaccactttaaaagcaacagccgcaaggcgcaagctgtcgatgcccttaaacaattcggcgtcaaagtggttagcaaagatcccactgttgttactcagtcgggttctcccgatcttgagtctgctcccccagctgggtctactgcgacctctggtgcgtggcctgatctgaagaaataatgttcaaggggcttcggcccctttcttttggtgttaaggaatggatgtggtaaacaagagattgctcgtcacccagggcggggcgacgatagtaagaggccggatttatgaacaaactaaactcggctcacacaaaactagactgaaagtgaaagcgccagatggtggttggcccacaaatgtcattgttcccgatggcctcttagaacgagggttcgcgacatatcgaggggcagagttcaaaatttattaaaatgtttattgaaaaactttacttcttcaataactggcgtatacttcaaattgtagtacgaacaaacaacaaattgaagagaaggaaatacatcatgggcatcgaaatcatcgttcaatcaaaatcaggcaaaacagtaatgtacggcactgaagaaggtcgctgcatcattaactacggcaccatcactggtgaagcgccagagaaaggtggtcgctatttggttgagtatggttcgcgtgtcctgatggtgagcaaagtcgacggtcgtgaaattatgattccacgcaaagaatactttgattctcgggttgaagccatgcagttcttcctgttccagcagcgccatgagcgttttgtagaagccaaagacgccgggctggacgatgcaactgccgaactgattgccgaagggaaaatgactcttgaagccgctctgggcgatatggatatggacgccgaagcacattggattgaatattccgcataccagaacgaatgtgaagatgatccggaagatgacgggtttgatccggatctccacggcggcgaagacgacaatacccctcctctggaaattctgatggcaggtggtcaggccgcttgggaatggcagaacgagaaaaatgcctggctggatagccgcctctaatatcaggtaaagcccctccgggggattcctatccaaatttgaaacataggtctacataaagaaggggctttcgccccttttcttattcccagaaatcatcgtcatcatcgacgtcagccaattcagtatccagatattcatccgaatactccggcagtttgccattctgtttcaaatattcgatctcatcatcttcgagctgcaggtcggtggcgataaaaagtgcatcgctttcttcgtcgtgctcaatgctgtacgacgtatattccatgccctgaacagtaatgatgatgctggttggatcatcggggtcgacgtgtgcctcgaaaggaactccatcaatcggagcgtcttccaggaaagttgccagggcgatagcagcacgaacaacgtcggtgccttctacggacgcatagatctcttcagcgccagtttccccgcgctcaaaaaactctatggttgtgccgtcttgaacgccagtccagattggagcgtccaatattgactcagattcgaataaagtggagattgccatgtcagtgatcctcagtgtggattatggggtatttagctgattctctttgccaaaccaggtttatacaggacaatttccctgacaattggcaaattaaccatatccaggatcatagcggagtcatatccccgattcattagttctttggcattggcatggagtttatctggcgggatacccaattcacgcatacgatcttcccaggcggatacattattggaatccaaaatgagaggtgaacggacattgacgttaaatgtcataacatgcggtgtgcccgaattacgatagcggacggcgttttcagcataccgcagtgcttcttctttgttacctgtcaaatagaagcccgcacccatagtccccgaatctgtttgaccaaatttttcgaagtcaaatacgtcgaattcaacattagaaccgtggaatagttctaaattattgaattgaggtttggtttcttcacgcaagaaatcaagaaaggttttcataaaataccccacacggattgtatggggtatttaggaaggatcagttaccaccaggacagaacacgttcccgcagagaggaccaccatcgttgtctctgcgaccacaagtgctacagaagccaccataattcggcttctgcttgagtggagaaacatttttctgttgttgagggacgactttctttattttcattcaggtttaaactcattcacaggaacattttcagggataaccaactcaggacatgctgccttcatcggttctacgtagggcttgctgccaacaatccagaacaatgtgttttcattcaacagttctggtttgtgttcttggatccatgtcatcaccttgccttcatagcgaggatgaagttcaatgtcaccccattggtattccatcagatcgttgtaacgaacccaattggtggtgtgcaaatcccaatgatggacattaaagcgcggagaaccagtccctctctccagttcttttgggtcgtaccgactaaacaggccagccagtgaaacgctcttaggggactgcggagagtccttcttgccatacaggtagtccgggttgtcgtggtagtgacgggtgaagtccacaatatgcggtagattggcatattcgccgataatgcgcaggcgactttcaatgaagtcgaggcgatttgggccaataccgatcaggtacacatttttcagattcggttttgggtgcatcgccagcccggttagaatactggtacaggagttgcaagagccagcagggatgatcagatcagtaatatggtccgggatgttggcgacctgttcaccacccagcatatggaagcctgcgatacgctccggggaatgcaatttatgatccagagtgatcccatactccagataatatgcctttggattctgctgctcaatcagctttttgcagcgcggttgaatggtgctgttgtagcccgagccaacgaagttgaactcgctaccgaaccaggcagacattgctaccatgtcgtggttcatgcaagtggttggcttggttgcacccagaactgtagtcgtatgcccgccgaagtgccgagagactgccgtcgccataggggactgcggactaccaacgacagtaccatggatgatgtcgggggagcctccggccttaatatgctcaaccatgagccagatagcctgacggagtttgcttccgttgataccctgttgtccgtttgcatagttggacaacggcgcgaagtaatcttcacgtttgaaccagacctgttggttggttacggggttggcaacgagttcacatggggtgtgtttatagagatagtcttcccagtgcaccagatttcggtccagggatagggtgttgaaaattgacttgttgtggtgttgggagatcacaccttcagtttgggtatcgttcattctatttctcctgtagacattggcatatcatagcgtatctacaggagtatagaaaaggagaatctcagcctactttgtcaggaaatccatcaggcgtctgaagaacgatttgtgttcaatcggtttcttagattcaggaaccgggatagaactgtcatgacgtaattgacgagacaaagaatcatcatctttgacgacacgagtttttggaggcacaggcggagctggcggcaccggaacttcacgactacgcaccatggtttcatagtcacgggcgatctcaatatatttccggcgctcagtgaagaaatcaactgctttcactttccggcggcgggcatgagaactctcttcgccatagtagtcgtaattgttacgaaccatccagttcacagcttgttcaaatgtgttgaacaccagcatgggaatgccgtcgcctttctcaatacaatccagtgaagagtacccgacaatgacggtcatacctttctggaacaacttacaggggatggcgttacccggagtgttgcggttgcgcgggacgatgtgatcttcacggtgaacaaagttcggatacaaaaactcattgagagtccctttgtagcccttgtaagtgtacatacggacaaagggaggaacgtcggcgaccacgtcgttcagttcccagatagtaacattgcgcatcagtatttcctcagttcatattggacaataaattatagcgtgaatcggttatagattaacctatctggggattcagaattatagacaaaaagaagcccggtatccttaccgggctttgataaagaccaaaatcacatggcctattcgcagttatgctacacagattattgggagagtgcgccgggaatcgaacccagagtcatcagaacttagaaagctatgtgcatttcacctacggttctgtgatttattcttcctcaactccagattaagaaacaggggcatgcacaccttactgttcccgcaggaagtcgcacccataatttggaaggagcaccaggattcgaacctgagatcatgggatcaaagcccattgccttaccgcttggctatgctcctgtaatttggacgggcttctcacccgattgtgcatttgatctgccgtagcccaactccccgcgtcgtaacgccgattggttaaccggcaaccagtgccttctggttcgatctcctggaactttacaggcttcgcgccaaaccatttctggtagttggggcatcgtttccgatgtggagtcatcccattttatacacagctggctgcaacgcttactgtgtttgtatcagagtgtccggtgtagcattccgtgaggtgcgcactactgtagcctctacactctgaatttgtatgaagtgggaatcactctcctgggtgtctgtatcctgcaaccttacattggcagctatcgcgcgattcgcacttccgaaggcgcttcgagacactccacttcaatttggtccggaacccggttctgggccacgcttgaggacatcggccatccttcctcagctaatcaaccgggttccagatttggtgggcgttactttcgtcggtttcagattccgttcggctattggacgttgttccaaagaacttgtcggtcgcgtacttcgtgcttactcgctttcgtttcacacccattatctggcgatggtggcaggacttgaacctgcgacatatggattaacagtccaccgttctaccgactgaactacaccatcatcaatttggcggaagatacaggattcgaacctgtgcaacctttcggttgtacaccttagcagggtgctgcaataccgctctgccaatcttcctatttattcgattctatggctcgaagttgcttctcagcgtcttctttggagtcatgtgttcccaaaacctttgttttggtatgatccaacacaacccaatgatcaccacgcttttcaacaaactcaactatcggctcgtcattacattcactgagataatcactgaacgatttcatcatactcaccaattgtttattgaacaactggtttatttattctgtaaccaacagcagtttttgtcatagtgaaattattgccatcaccatctttatacaaaacaccatcagatttttcgttcaaagactgttctgaacggcgaatcttttcttttaatgatactttgcctttcatgttcaatctcttattttggtgttccctacaggattcgaacctgtgaccgacggcttagaaggccgttgctctatccagctgagctaaggaaacatatggtgatcctgattggttttgaaccaatgaccaatcgattatgagtcgactgctctaaccactgagctacaggaccaaaatcttttaattcatattgtcgtggacaataccaagacagagggttggaatctcttgtcctatagcgacccataaaccgtttgatcagtacggcctaaaggattacccacgacaatatgaactacttactctttggtctgggggaggatttacctcccccattcctcccggtttgggcagcgatctctcactcaaccagggcgccggcaaattttagatcaattctacaggtttgtaaccgcgctgtcgccaagtcatgttgcttctcctatcattatttgaccgcacttatggcgggccgggttgtaatagttgagttgtgatcaaccaagggctgctagaccttttatcccgtttgcgcatgatcagttcatgcgagtcttatcaagcaccttacggcaactcttctggatgtcatcgccctgctgccaggctcatcccaggagtttatttttccagggctttccacttacaagtcttaaccagaccgggatacgggcttgtaagatcgggttggacacaactttgaggacactgacgacgtctactagtcacccataactgatattcggatgccagtatcctcaaagttgcaaccaatgtcgcaactcgcacctaagtgaaagtcaggcacttgtctattcgctagaccaagctgtttggtgtcgggtgcctcccgatgaccttaccacggaaaataaggccgggtgtgatgaaaccatcagactcaaggagatgagactattccgttccctcttgcgcttagcagaattcaccaaacatagcagcatctatacagaagcaacttgtcctctaacgctcggaccaaacgaggctggctggttgattcagagccgctggttgctccagcaagcatgggttgatagcccggcaacatagaatcacccaaagatgaagaacattcatgactcacaccacaccacgaatggcctgaaagagaatcgaactctttaaatgctcttcattttgtgaacttgagaatactacgcctgtctcgggtttccccttagttcggcctcccagtcctcgccgcgccgggtagctaaccctgatggctcgtctgctactgagttcttcttggtgcccaccagtgcccggaatgtgtaggcatcgcaatctgcaaggcatggtctttttcacccaatgctctctcaagttcacaaatcgaagtgccctgactcaacagttgtggcccaacatattgttatcgtctaccgggctggccgtccactttgtagatcaacctttgggtttaagataaattgtcaaggcacttcgatttgtgtggatgtcatgcaagaccgggtgtctgccagatcaccagacattgtgttcagttttgaacagaggctgtagggttatgaaccgcaacatgtcttcaaaccttgcacaatgaaatgtcatctcagtcctgaatcacgttcacggtggtgagccactacaagtgagaaccgatttgcatttaccttgcattccatctttgagggcattcagtgtacaacaggctccgatattgactagcgctattccggcgtcggatttaagttgcctttcccctgaagttccatgcagtttcgcgtctgacgcggaatgccctcaaagatggagccgttttagtcggcgggagcttattaatcacaccctcccgcctattgttagtgcgccgaattcattgacaaggagtcggaagaccttgctggtgtatggctgttaagctactgccaggaacgtattatcgtttgcatttatctttgtggtcagtttctaaaaacccgcaaagtcgcacacaacgagaacgaaaacctgtttgagcacaagacaccatgtcctgggttcacatcgaagtgtttgtctaatgcccaaacagcttttctctcagtgggttaactatactctgttaactcttattgacaaaactttttatttgccggaacttacgcatccggcctcgtcctgttggcgctcctagaatccgggaagacagtaggaacaattatgttaccaacaggaaacctttgtgttgccctttgacgcaacattatgaaccctctttagaagactcataatgttgtcggtgtgatgaggattaccagccctcgaccttcccatcgtgcggtgtcgactcgccgccgggatgctctcgcctccgctttgcggatacttttctgagctaatcacactttcaacagggagtttcgttctccgacggttagtgcgtccaccaacaccagcagggttactgcgctgcctctattcacacaagcccctgagactaggggttaactggtttcgggttcaagcctactcccactgtgctgtttcccttgaaattttatgatactacaacacggctaatttgaaaagtcctctcctcttgagcaacaggacccaaaatcctgcggcgaacctctgctcaaaacccggtgcgctatcgaaggcgctttaccagagtaaacatcgggtgttcccaggagagtgaaggccatcccgatgatgaggataaggagtaacgctatgattgtcatactgttccctcccttccatgcaacttactttactgtaattctgtattgaataaagcgttattttaccacagaaaacttcacaaccttctctaggataaacacatattcctgagcagctgcattcgacatataatgcgtagacggaatagaatgtgaattcgttgtttcgcccagattaacacggtcacaccagccattgatggcattaccgtagaagccgatgatcgcaacgaagtagatgcgctggctttctggttccagaacatagttgattgtgaacgcagtgtccgtgcggacggcttccagtttgatcccaatacgacattccggcatgttgggacgaacatataaatgacggaagcggtcgcggcgggcggtggaagattgttccagttcgttgcggaactcactcgtgacgtcgatgttaaatgaaaaggtgttgtgtttcatatcggaacgagcaagggaaaccgcattgtcgataacgcgacggaaatttacccctttatttgtcaggagtttaacttcctcagcaattgtcgtcaaagaaattttggtggcttgttgtccttcatatttttctaataaaggaatgatgtgtttcataactgcggtgttaatgtgcataataagatcctcttgtagaattgaaataaacgccatcattataatagaacgaatgttattgaatatttgtctctaaattacaggagtgttttattaataggcagaaactacttttctaacacatctctagactgtatgctaacgctgtgcccttcgagttgtgagtgtcaacgaacaacgagaagcagcctccctggctgtggaagggtgccagcccgcacagggcggtcttacgagcgaagcgagttgattaatatatttgataataacgcgcgcgagaacaaattcctttctctgtcttcaacagctaaatatctccaacaccatattcaaacttgtgtgacggagatcaacatggctacacaaacagttccttcactcgacgtcagggctttcgaatacattatcaagcagcgtatgaaagctgatccgaccttcaaggattatgactttgaaggatctggtctcagtgctatcatccgtctgcttgcctctgacgcgaatgctatcggctttatgcagaatatgctgaacggagaaagtcacctccaatcagcccaacaacgttctaatgttggcttgtcatctgcattcttgtcgtacacccctgagaactatcaggcggcgtacatgtatgcaaatgttaaagtcaccccctacgatgcggccacagcaccaagcgaaatcatcatggatcgcaaggttatgtttgttggggccaaagatgggaagtcttacaacttcaccgttgaaaaacctgtgtccacaaccctgcgaccagaaggatattatctttttgagaatgtaaaactcattcagggtgattggctttacaaaacgtatgatgttgaaggtagcgcgatcagtacatacaagatcccatctactaatgtagatatcaatcatctggttgtcaacgtgcaggaatctgagacttctgatgtgtcttacacgtttgatcgttacaacagtccgtttgatctgaatcaatacgctcgtctttatttcgtggaattgggccttgatggcttctacacttttgaatttggggatggttatatttgtcgtcgtgttgaagacgggaacgtcgtgttcttgcagtatctggagacttccggcgcggacggcaacgatattacttcagtttcatccgcgactgcgatcgctgggaacaacctggtagatatcgaactcgtatcggaaagaagcgcgggcggtactgatccagagtccatagaggataccaagcgtcttgcccctctgagctatcaggcggacggcgcagcagtagccgaaacagactatgcctacctgacagagaaactcttctcgaacgttctacgggctaaaggctatggtggagatacgctcaatccaccggaccctggttatgtttacatcgctgtaatcccaacagtgggtgaaacactttccgatgctgagaaagccgatatcgtgtctactcttgacaaatacaatgttggttctataactccgaaggttgtggacgccgaagtcacgtatattcaggtcaacaccacgatattctgggacccgacggcaacagcgtatgctgaagacgggttgaaaactctcgtcaagaaaggtgttgtaacctggggaaccaataatctcgacaattttgatgagctgtttgacaaagaagttttacaaaacgccataacagatatggagcgttccatcgtttccaatattacttctgtcgcgtacaagcgtcacttcaaaccagaatatggtgttcttgacagctttacgtttgatttcggtcgttccatcaaatctggctcggttgttatcaacgggttcaagccgcttccagctgaagttgatttcacttattacatccgggatgtaaatggtgttctcaatatgtacaaggtcagcacttctgatacgacgaaggaatatctggtgcaggctgttggtgtcgttgattacgcaaatggcgtcgttgaacttcagcagatcacagtgtcaaactatgatgaaggtggcgcggctattgttgtatccccagaagggttgaatcagaacatccaggttgcgtccaatcaggttcttcgtattggtgatgtgaccgtagacgcggaggtccgctatgtccaaagatcttaataacggacatctgggcgtcaagtatgagacgccgttgttctaccagaacgatttccctctgttcattgagttcatggatacgttcttcaattggctgtaccgccaaaatggtttcactgaagaagaaatccttgcttacctggcagacaccagttggctgaatccggatagtgacgccagcccgctgatgcagctggtagacctgaagatacagaagacgcccggtactgctgcgcgtgatatgctccttgacaaatatttggtcaggacatttgagcaaatgatggcacttgatactgaagaattgttggactctgatggtcgtccattgttttcacctgaagacaagaattcaagtattgacgcctggtataaagaattcgggtttcaaagaacggttgacaaatcttttcctgaatttggattctttgtaccagaaggctctgatggccttattacatccgatggcaatcagttctctgtttatatcgagggaacgcgccgccggacattagaccatacccgctggctgaaattgttgaagcatatctataaaatacggggaacacagaaagcgatagaattgttcttctggatttatttcggtgttcctgttactgtgtattatccaaaagaagatttggctggtctggatgctaactttgattgtgatggtgaagttggtcttcgtgatgattactactatgacgaatacacatatgtcataagaatacctggcgacgtcgcagatttcgaaggtgtattcgatcgcgtgttccgtcaacacttccatccatctggtttcaaagtattcctcgaaagcactaggagttaagaaaatggctgattatctgagcaaatatacaggccagcagatagataatattctagatgcggtcgatggaaaactgaacaaaactgatgtcgtgaatgatatcacggtagatgacgacctgtccccggcgtcagcacaccttacgttcgtcttgaaatctgctatcgatacaatgaacgacgttttgtccaacaaagttgttcggaccgatgggcaagaacaaacgataaacgggaaaaagacttttgcgtctgtggtgaatgcaaatggtggcatcgtagtcccgacccaacgctccataacgatcacggatgaacctgcggccaacacggatgcggtgaacctcagcatgttgaaaaaacatggactgagcactgtggactccgttggttctggttctggtctgaagatttcgttgcttcccaatggttacaacaaattagaagtcgatctctccaatcttgtcgtgaggacaggcacagcgctccctcaatcgctggctgtgtattcaccaacaggtgggtcacaaatatggtctatgacaagcctgtttaacaatatattcgctgacactcgtttcaacgattacgtgaaggtcgtggattatgattcagatatgctgaacattgaaacgcaattcaccagtgtcaacaaccgtataaacctgaaactggatactgcgacatatacgacgaagatgaccagtctggattctcagatagcgaatttgcaatctgggaaagtagataatacgacgtatacggcgaaaatgatcagccttgacagtcaaatcagcggcctgtctacgaataaggttgacaaatccacgtatgacaccaaaatgaccagtttagatagccaaattagtggcctgtcttcaaacaaagtcgacaaatccacgtatgacaccaaaatgaccagccttgacagccaaatcagcggcctgtcttcaaacaaagtcgatgtatcgacgtacactactgatatgaacgccttgaatttggcgctggcgggttcggtaaaattggctaaaaccaacaccaccagtgtttctgtcccggcttctggtagtgctgcgttacctgatttcactttggtgaatctgtgtcaaattttgattacggctaaatggggtacattggttgatacattcttggtcacaatgacgtatgacggtactcttcaggcgacgtcattgacacaaaaaagtacggcggggactttgtcgttcgcaggttctgttgtttcaggtaaactacgcctgacaatgaccaatgctaatacaacaaccgcagcatctgtcgattattcacttcgtgcttctttctaaatcttaaactaaatacccctagacgagattacatgtgctaggggtattttcaaatggctaataaacccacgaaaccaaattttccgcttgggcttgaatcacaagatcaatccgtatttcaagaaggtattctgaataatggtgttgtagaacatggcccagatgcagtaatgactgtgccagaaactcctgacgcatctggggttccttctgctgtccgttataacgaagacgacgaccagtttgaaggatattacaacgaaggcggctggttgccgcttggtggcggtaacggtgggcgctgggaactccttccgcatgccccttcatccttattacagattggtcgtgcatatctggtggataacatcgacggtgcctctacggtggttttcccttcccctaaacgggttggtgatagcatcactgtgtgtgacctttttggtaaattctcaacttatcctctgactgtcgacggtaacggtaaatcgatctatggctctgcggatagcatgacgatttctaccgataatgtcagtgcgactttcacatggactggtgaagcccgtggctgggttattacatcaggcgtcggtctggggcaaggccgggtttacagccgcgaaatttacagccaaattctgtcagcgacaacaccatctattactctgagcactcaaccatctattgtagatgtgtatgttgacggaaaacgtttgaaagaatccctgtatactctcgacgggtatgaagtcaaatttgatccggcgttggcctctggttctgatgtgcagattattcagtacatcccaattcagctcggcgcgggcggtgggggttctggtggcactgtaatcacctgggaatacaacggcggttcagctatcggcggcgaaacccaaatcgtgttggatgtggtcgtggactcagtatctgagatctacatccgtggttcccgtcaacagataggacgtgggttcacatttgatcctgctaccagtacgattactctggcggatgaactggaagctggggacgacgtcgtcgttgttattaatggggaccccaccgtttacaaccaaatcgatcgttctccgcaagaagtggcgcgggccaacaacgtcaagaactctgaagtcatcctcagcactgagacgaatacagttttagacggtaagaacattgtttatgacgtggtggcccaaacaagttggagaattccaacagggataccggctggtgcgaaaataaatcgtgttatcgggaatattttagtgtatacgccaggcaacgttagcgtaaatctcatagaaattccttcggcttattctctaaaatctcaattaggttctgattacgggtcatttttgctcaatgccaaaagaaaacctttgggtgaagctgtacttgcagtatctactgcaggtctgttgtacagttcctcctgggttagtattatggaatatgctcatctggttactaatcgtccagatccaaacgatcagaccacttgggtttgggatcccgcgatacatgcatatttagacgatacagggattttgattaatcaaacacctgttaactccaatatgaaagctaaattcccgttggtgttcccgccgggtgtgttcaaaatcgaaaatagctatttgttggaacggatagcaggcagcacagggagccttgctactatctttatgttcatcggttcagggatgacatcgactatcattcaaccgatgacagaagggcagatagcattcactgtacaagattgtaaaatcaattttagagacattggtttccgttctggggctgattaccagacatgtttggtcttgggaaataaaactttgtggaaaccagttttccattgtaatatgactcgagtgggagcgtctggatttggtaagggtctggtgatttacctcgcattcgattctacctttgaggatatatttgtacagaatatatctaaaatggatgttactggtactcaagtttcctatggtataaccatagaaaaatatgagggtcctgctaatggcgggactgctggtgacggaaccggtgatgattctaaccaattggtgtttattcgccctactgttgaaactgcgaaagcagacaattctatacttttcaacgtagcaggccgttcaacttcattaccacaccatgctattaatttgtttggcggccatttcgaaacgcataacttaaaagctaagttgctgaatcttgcatttggctataatgtcaacatgttcggcacagttttttcacaaaacgggcctactatcgattctgacaataacccgataacaacggtttaccggggtgtttacatcgagaactctcagaacgtcaatatgtttggttgccggattggcactaccaacagactggcttctgttggcgtttctgataccaagtttatcaaaatcacgggtacttcacagaacgtgaatttgataaacacccatttgatcgggccttataatgacatatcttctgagcgccataatattgacaacattatagattattcggaagcaacaaaagggataaaatcatttacggtacagggcgtcaccgccggggattataccagccgcccgataaccaaagacataagaatcagcagtctagacgggaagaaagaatattctttctatactgataattccggggttttgcatttatcgtattctaccaatatagcggattcaagtacgcctacagatttgatgacgatggatacaagtggtaatatcctgacggcagcggacttgactctaggggcattggcagggactgcagctacaaggcgactgtcaggtaatggcggctatatcgcctttgatacaattggtcgtgtgtatttcaacgctgtaagcaactcccaacaatgggtgatgggttcggcagcatttaacccgacgaccgataacgcattcactttggggcaatcagggtttaggatatctgccagttttgtcgtgaagcgccaatatactgcgacagtatatgattccgctggtaatggtagcccagaaggggttgtaactgctggtgttgggtcgacttatcgtcggttggacggaacggcaggtacttgtttctatgtgaaagaatctggaaccggtaataccggttgggtggcgaaataatgaaaatgaaagttattcgagatagttctggtaaagttatcaatatcggtgactgggattatatggaagagactattgaagatccgacgactggtgaaatccatgttgtttctcacaatcctatcccagaagggtcaactgaagatgaagaagaaatttcacaatcagaagacggcggtttatacgtaatgtaatatttcaactaaataccccatattggtaacgccttatggggtattttcaaatgaccagaaacatagaagaaatcttcggtggggtggtcgtagcaccacaccagatcccgttcacatacacttcaactaacggcggagaaactttcctttccctgccattttatcctatcaccgggttcgttactatcaacagtggtgtacaggtcccgattgataattttgaaatagacgggaatacattaaaccttggccgcgaactggaaccaggggatgtcgtattctgtctgtttgataaaatcatgtctcctcaggatgcgagtaacaatgcaattcgtatctacaaattcctttctgtcggcggtgaaacagaatttactcctgattttactgcttatggagtacagagtctttatatcgatgggaaataccaaatagctggtgaggattacaattatttcaaatcatctggcaaggtggtattgaattctccgctggttgctggtgtatgggtcagcgccgaaatgtcagtaaaacaaaacattcccgctcttgctggtaataatggggcgagtgaaatagggacgacaacgggagaaactgtacaacaagttattgacagaaattatgtgaatttacgggaacattggcgccgccaaattgtggatattggcctcaatttggttgatggtagttttgaagagggggctactgtatctacctctactgatgctatttggtacatggcagaaggtcagtgctacacttggggaggtgatttaccaaaaactgtaccagaaaaatcaactccgcagtctactggagggatctctaattctgcatggaaaagtttacaatcccagacgacgcttacggccctagctaaagtgaatggcctgcaaaaaattggtcgggcgaatacggcagctgcccttcgggcatatgaaccggcaaccccaagagaggtagtgcttgctgatattaacggactcgattactggtattatgatgatacagacactactacaccagataatggttatttctgtgtagtaacaactgatggtaaaagatggcgcaggaataatagcagtgattatattgatctaagttggttaggtctaaaacctggtatggatgttcaaccatactggcaagcagcaattgatatcattcataccgcagcaatggcgcagttgtcaatttatgacttgccttacattagggttcaaggtggaaattatctgctatcaggaacggttactactcctccgtatatctctacagttttcacgaaggatactaagctggtagctgatgctctggttgatggaacccatgaggctgctattgttatttattgcaatgatgcaacaaatttatataacaacagccgtagttcttcgttcccgaaaaccatctcgtgcagtgctgggaaaatcaagctagtgagagctggcgcaagggcaaagacaaaccctattggcctttacaccaaaggcgcaacatcaactgcacacgccattaacatgaggatctcagatttagaggtctccggtgcatttttggctgggcacgggaacacgtctacacgtacctggttgatgcgcttcggtaattgccagtttaatggattctacggtattgcctactatggtactaacacagatagtggcgagaggatcacttatagcaactgtgtggtttctggtgggtataatgaccccacgaccaaatctatttacatggaaacgtctggaataaatctccactttttatcatgcagcatagattttactggtggcgatattatctatcttaccgcctcagctaagtggtgtaccatcgaatttgaggattcacacattgaaaactggaacggttatcttgtaaatgcggaggacacttctaactttgccaggttcatagtgtttcgtgcgacaaacatgttgccaaacggggatcttggttatgctcaatctctttcaagaaaattactgaaagggggaagttgcaatgttctttttgatgattgttttgtgtcatggactgtatatccttacgattcatatgacagcatccttgaaacaggttccacaatcactgtgcgagtcagaaatcataagaaccttaatctagggttgcacccgtttactactgataaccggctgttgagggtgtataactttaccacggaagctgctggtaacgtgttgacgtcaagcgcggcaaccacaacaacgacgactgttagaaagtatggcaatagctttgctaacgtaacagcaatcattgttgctctggataactcgcttattgatacaggtctagcgcctggtacgactaacacgatgaagttgacctggggttcaggtgggtatgcttacattgaaacagtggaaaaagtaagagtaaccccgagccgtgattatggtatgaaggccacggctatcatgccggatttaactagtaagttgaatttatccccggcaatcgcatggtatgatgagaatgataacctcatatctaaaactgaggtctactatagcgatatgaaccagatagttaatcagtcgattacaggagttgccgcatatccatctcgtgcaaataaacgagtggcttgcagaacatcatctgttaaagccccagctggggcagcatatgcacgcggtgttatgcaattgactaacggaactactggttcagtatactacctgactgactataatttgtttatttcaccgacaaattagttcttgaggtaaaaggtagggcacagactattaaatacaccagatgtgtcctacaccgatacctccccttctggggaagtatttcaaaactacaacatgaggattaacccatgaataggatgttcacaaccactggtccagtaggaacccaaaccaataagtagaccataccaacttcagaaaaacaacaggagattcatcatgaatccacaatttagtcaggccggtggttccgtctctaaagacgtgaacaaacaatctatcgcacgtgtatacggcgttaaaatgagcgaagtggcttatttgaaagccggattagtattgaatggttataaggtgttgtttgataaaacaacccaaacttgttggaaaagtggcaacgctacaggtacatcgatttcctggcaagtctctggtagctctctgaacttagtaactactactggctcgtatgtactacccctttttgacatacttgcaaaccttggttcaggcgagggacttcttcacataggaagtgtagctaccattgctcaattatccacagtctcccccgtaacggtaggtcagcgcatacaagttaccgaatatgctttaggttatgtagtaggtggtggtaactttattgtacaaaagtcatctgattatacggttgacggtgggaaggtagtggcatccgcaacgtcggggttggtcttcgtacgtgaggaatactatgcgtcccgcactgttaagcccgaatggtacggttgtcgtggtaaaggctcggccatacccgacacagttccgtttaaaacgatgctcggtgcccttgttaatggcgactacatcagattgatggccaatgctgtttattacaatagctttcccaataattcgcaggcaacagatgggtggacaataaccgccgataatatcacattagacggtgtgggcggcgccaccctgtcccgcgcaacaccttcatcagcaagctactctggttttaccacgctcaagattgccggcagtaaaaacccgagactggtggggtcactgctcatcacctctgatgaccccaccaacaggcctttatacgcataccaaagtttgaccaaaatcgactcaagggagattttcacatctcccttggccaatacgctaggcctgtgggcgtctggcgttgatggcctttatatcgataaatcggtaatactggaaagagctgtcttcccttacttcgccaataacggcacaaagaacaaaaaggtgttctgcactgccagaaaatcaggtcagatttacccgcagccgacgtcagcaagttcagatttggcactcggtagtacctttaagctggatgcgtgttccgactttatcatggaggttgttgccaacgattcggcatatgcaggcattgagtctgagagtaacaacgtcaatggcagcataaccctagtaaccaatagggcgtaccatgccggactccatttatggaacagatgtaagaacattacttacaaggtctccgcgacggatatcgttgaggggggtggcgttattacagggtatggttgcgaggcatgtagcggtgacgttacagcctataacgcacaatacgtcgcggcattcataggaaattccgcaacaacccccgttataagctgtaacgtaaaaggctctgggtatggcgtgactgatgctgttgtattctatacaacggctgcgaataatgcctatatccagcactgtaacgtggatattactgctgtgcacgctgatgtattctccatcggcactggccgacaatcagctatcaagttcaatggcgggcagtactgtgacatcaaagtaaatgctaaagattttgactacatattttcacttggcatgggggcaaataacaaatttaatgttgcatataatgcattcaatacagcgttctcgtactcagatcaacgatcttttgacaatgagtataaatacactgaccctgctggcagtgtgtaccatttgcaggcaaagggaagttcttatgagtacaggtcagatgctgtcactaacccggttcttgggtataaggcactgctaaggaagcagatagttacagatgggtttgttaacccgaacctaccacaaacaactgcatcggtgggtggtttttactatgacccaaccacgaaatatgtaagggttaatctgtaaaggtgaaattatggttgaacttgatgagatgtttagtaaccgtgcagtggttgcacaggctctttcggaggctcaggagatggccgtccagactgatgatggaaacgggggggaacttaccctggaagaccaaatagcatttgcacaagctcaggagtaggtattctgacagcttataactggtgatggtaatcctgttctaaggacatcgctgcaatggtttaaacaaagccccttcggggggcttttcttttgaacaaactaaatacaatgagacattgttagaaaaacaacatgaggaaccacccatgaaaacgcagtttaaccaatcccaaggctcgacttcacgcgaaaccaacaaagaagcgattgctcgtatcttcggtttgaagaagtctcaagtcggctatttgtcgacatccaccccaattgactcatatgtcatattgtttgacaaagaaactcagacttgttggtatcgtggtacagccactggcacaccgataagttggtctataagttggtctatttctggttccgatctaaacattgttacgaccaatggggcatttttactcaaaatggctctacctgctgattatttgagatctaaagatggggcatcaaatatcggcgtaggaaaatctaccataaacttaactagacaagccacgatttttgaatatttgtcaaccgaagatcaaacagcgttgttaacagatgtgtcttcaagggttaatatagaccaagcattgaaggatgcaatatctgatggggttatgaacctaagattgccttgggttttgggtcggtatgtggctggttcttcaatggctactttaccaataggatttgagttgtgggccaattcatgtcgtcgaccttatactgctcccaatgatgccgcttttaatggaactggggttactatccaagtcgctgccggggcggtcgcgccgtttatttccacacagcgccatgtatttagaggtataaactttgatggtgtgaacaagacaccaacattgttctattcaaccaattcaggcgctcaattcaatggaagtcgggtggaacattgtggtatatatcggatggccgtggcattggggtggtcgggctatattgcaacattatttgcttaccgcaacagcatttctgggaatgccactggggtgcgcaatacaattgattctaatatccatcataacgtgatgaacgctaatgaccgccatatatcattgctgactggagctaataactcagactttacgagcaataggatagagtggagtaatagtcatggggtttatatctttgatgctgttcgtaatgttatcactggagaactaatcgacagatccgggggtgccgggatagtcgtggctggagttggttctttaacggtcaacgggacggttatccaacgaaacggtgcaacttccgcagtaaatgataattattctgcacacattgtccttctagataatgggaaaataacgttgaatggtgtaaggactacaacgggtgtgaatgacgatggtactgggacagcaagtccgtccttttgtgtgtcttatattggttcaggcaccccacaaattattgcttctgggtgtgatctcagtggttatttaacaagcgcggaaaacaataagaacaaccctgaggctataattacaggatgtaaagggatttctgatacaataacgattgggggaaccaaaaagataagatctagaaatgttatagatctaaaagaggcaacattagcagcgggggctggttcgactcttacatttaatttgtcaattccagtggatgaaagggctgggcctatacaatatggcgcttatctccgccgaactttagtcgtggaatgtcgtctttcaaccacaaccacacctgatgaattaacaataccaatttggttccgctatgaaacaggttggtcaatattaaaccgagcaagcaagttagatgttacatcaccccgtataggtatggataataccgcaactggcgtgatggtgaattggagtttaaacagcaccggggatacgttaaccgtcactttgacaagtatagatggaattgatagaaaaagtcgggtaacgctactacctatttgaggaaatagttatggaattgcaaacaccaccatttgatgattggttttcgacgttgatagaactcgcttctaaggaaacagatcttccgatttctacagaatacaaaggaaattggttggattacttttccagtggtttgtcaccagaagaagcaatagacgccgccaaaaattaaaataaagccccttcgggggctttattcttcatacgatgggttgtgtggtatactaaataatttcaagacaaaactctatagatggagtacaaaatgcaacaattgaatcttaaccgccgcccttattgggacgactggaatccagagaagcgtttcagccgcatcctgttccgcccgaatccaatcaaagtacagactcgtgagctgaaccagctgcagacaatcatgcaggaccagattgagaagattggtaatcatcttttcaaagacggttctatggttattcctggtggtctgacgatcactaactccgctgtttctatgaaatttcagctggcgggcgggagcgaattcaccgatcttgaaggaattcaagaactgtatgtgattggcaaagacaacaacgccaaggccagggtgttgtctctggagcgctacaccagcgagccggacatgatgttctgtatcctggaaatgaccgaatccggtactgccgatgggttcagtcctaacgataatctgtacttcaacacctatgatgtgaatgataacttcatccgcatcggctatggcgttgcccagactgtcggcggttctattgttgcgcgcatgaccaagggcgtctactttgttcgtggatttttcctcgacgttgatgatgatatgttggtcgttaacaagtacgcaaacaacaccagccatcgcgtcgggttcaaagttactgaagaaatcgttactgaagagcaagatagtagcctgttctctaatgcacagggtacgccaaacaccaaagcgccgggcgctcatcgcctgcgcctagatctgagtattcaggcgttcgattatgacgcggaagttgaagacttcgttgaactggcaaagatcaaagacggtaaaatccagtccatggtcacgcagtcgacgtacaatatcatcgaagacactatggcccagcgcacttatgaacaagctggtgactataatgtgtccacccaccagatcgatcttcgtgaacacctgaaagaaaacaacaacggcggcgtctatactttggccgaaggcggtgatgaaagcaaactggttgcggtaatgaagccagggatttcttatgtccgtggtcgtcgtattgagaatgtcggtgaagaactcgtcataatcgataaggcgcgtgataccgacctgctgaacaacacgccggttgctgtagcgacaggtaatttcctgacaaccaagaactctaaaggtgttccggttatcagccgcagcattcgctataaattgctgaacgcttctggtgttacccaagcgactgccctgtgtatctccgctgaccggaccgggacggaattccgtctgtatatgcgtgacctggtcgtcactggtgatatgagcacggtcaccaaagttgcttatgaagaaagcgggaccacgatgttttcggccgcgctggaaacaaatcagttctcacaaagttcatctatggacctcatatttgaactgcctgtctttggcgtgaaaactctggcaccgaccggaacgattgatatcaactacaccgtcttgcggtcttacaaaattacgctggacgcatcaggcaatggttctatatccgcaccgctgggatacagcttttctccggaattttctctgtattccggggctaaatctgacggaaccgccgcccagatcgatatctccagcagcctgtctctgaccgggacaccagttgggtcggctctgcagatttctctgggttctggtaacgctctacagtctattaacctgttggcactgatggtacgcaccactgctatcatcaaaaccaaaactgttacaactgcgactgagactgtgacctttaccaaccaggccagcatccagcttgcgaaccatgacggctacaaattgacttccgtcaaaaatgctaatggcgctgacgtgacctctaacttcactctggatggcgggcagcgtgatgcggcgtactacaagtccagtctgatatcggccactggagtcatttcaggcgcgtataccgtggaatacacgtatttcgctcacagtactggtgacttctttacagctgattcgtatacttcgattgattacaaatcaatcccgaattatacgtcaagcacttctggtacagtgtatggcctggccgacagtattgacttccgtccgaagatcaccaacggggcttctgatactgatatggtgcggccgaatacggctatcatcatggacgttgaatattatctgcctcgcattgatgctgtgtacctggcagacaacggcgttttcaacgttgctcgtggtatcagttcgaacaacctggcggctcctgctatcccggcaaacgccatgcgtttgtatgaactgctgatccctccgtatactccggatattgacgatatccagatccgtactatcgacaatcgccgctacacaatgcgggacatcggtaaactggacacccgtatatcgaacgtcgagtactacacgacgctgtctcagctggaatcttcggctatgacccagcaagtgttcgacccggtaacaggcaacccacgttacaaaaatggtatcgctgctgatccgttcaaagacttccgtctgattgatgatctgtcttccgactggatgggttccgtcgacaccgacaatggtcgcctgcgtccgtttgtacaacaaaacgcaattgatctggtcccagatggttgggacaaggttatggacggtatggtcgtgtgcaaatacacgccggaaatttctgtcaaccaggaatatgcgacgacaacgatcaacgtcaacccatatgctgtgtttaactggacggggttcctcaaactcaatccgacaacagattactggtttgaaaactactatgttgcacctcgtgtgatcaacgagacgatcaatacccgtggcgctgtcaaagaaggtacggtttatggtacatggcggaccgtgtctgtttctgagcgggtatgggaaccgcatggtgcaggcggtgtttggtggggctatcgttaccgcacgaccgtttcaactcgtgatgtttcgacttacacgtacacggatacaactacgacttcactttctggcgaacagattgttgagacgcaggttattccgtacatgcgttcgatcgaaatcaactttgacgccagcggcttgcgtccgtttactcggatgtatgccttcttctctggtcgggatgtgaacctgtattgcaaaccgaacggtggggcatacggtgcgccattgacgacagatgccaacggtaatttgaaaggtgtgttcaaagttccacagaataacaccattaagttcaatactggcgacaacgtcttccgtcttactgatagtccagtggatagcaagtctgctgatgatactctgacgaatgccgagattgttcataagtcctttggtaagaaacaaggtatccagaagacttatgttaacacacgtgtgctgggttatactgtatcgactaaatctgaaacaacgtcgtctgaagccgttgttggtcagtggcgtgatcctatcgcacagtctttcatggtggcgaccagcatcggtggtgaatacattgaaggcgtggaagtgttcttctcaagcaaatcacgtgatgttccagtaactctggaaatccgtgagatgagcaatggccttccggcaagtactgttatcacccggaaaactttgaacccgtctgacgtcaaagtatcgaatgactcttccctcgggacgaaattcactttcgattatccagtatatctgcaggctggcacagagtttgctatcgttcttctggctaacacccaggattacaatgcttacattgcagaaatgggtaaaaagaacttgctgtcgaatgaatatatcgccaaacagccgtatactggcgtgttcttcacttcgtcaaacggttcaacctggtctccaaaccaaatggcagatatgaaattccgtgtgtatcgctgtaattttgctgctgccgaaaacgtggtgacatttactccgaacgccgggcctaaaatccgtcctcttggtctgaatgtgttgaactgcgtcaatggttctacggtggtcacagtttacgcaccgggccatggtcttgttgcgggcaactctgtgacattatctgaactgacgggcggctgcggctttaccgcagagcaactgaataaagttcacaccgtcacggatgcgagctatacttcattcaagattgatgttggtgcagcggcagatagcgatggacagattggtggtgaagatggttctttcttgggcaattacctggtagatatgttctatgccagcgtgaccaattcagccctggaaggttctatattgaaactggaatatcgttatcgtgattctacttccaattctatgtctgattgggccgagtttgaatctgatactgatgttcctctgccgacagaaggcatttatcgtcaggccggggacttccaggtgagagccaccatgactcgcagcgcgagcaatgcgtacacggcaccaatgattgatggtgatgacttaaccgtggttctcaactcgcatggcgtagatcctttcgaggacgttttccgctatgtgaccaaggacgtaagttttgacaacccgtgtacaactttgaaaatgtacttcggcgcgatgttgccttctcagtccaccatgactgtacaggtcaaacttctgcgcccagggcaagaaatggattcgatcgaatgggaaacggttacaccgaattctcctctggtcaacgatggttccgcattctttgaatatgaatacgataagaccgtcgatagcagcagtccattttcagcactgaaagtcagagcattaattcgcggaagccggatagccccaccttcctgcaaagatttccgcttgatcgctctggcataaataaaattgaaatggcggggaatcccccgccctcttgagaggatatgtgtatgcgtggaatgaaagtacaggggcacgcatcaatggtacgcagtagctcttgccccggagcaatcatctgcactgaccatgttgctggaatggcggcgcttcggtctcgccaagatactgaacaaagagaggctaagattgctcagcaatcggcccaaattgatcagcttgaagcaaccgttaaaatgttggcagaaaaactcgggattacaatcccggacgggggcgaaaatgacaacgcagaataacagcttgtttaatgttaaggaaatcttgactgctgccgttgcatcgttgttagtctcttccgcgacattcgtatggtttatgggtggattagaaaaccgtgtgaatgttctggaaaaagactctgggaaagttgaccagattttggttaaggttaatgatctcagtgaaaggatggccgtcatgaacaacgatatatcctacgttaaacaaaacgtgtctgaattgaaattaaacagcagcagcctttctgacgatgttagaacattgcgcctgactgtttcagatatacagcgcaaggagggtgtcaatggccgtcaataagattcgggacaaagattcatttatgaattatgtccttcgcaaattgggtgcgcctgtcatccagatcaacctcgacaaaacacaagttgaagacgcggttgatgatgctttacagaagttttgggagtaccatcgcgacggtagccaagatgcattcttcctttaccaggtgaagcaggaagacatcgataaaggatatatcacctttccagaagatatcgatgacgttgtcgaagttatccaagggccaccaattgaatctatcggtaactgggcaaccccccagtggcagatggctcaggcgatgttagtgcccaaagctgctttggtatctatccgtcttatcgattatgttgctatgcagcagcgcctttccgatatcaccagcgtcctcaatgtccgcagggcattcgtttacaagaaattccagcgccgtctgtaccctcaattctcagctgttatcgatgaagtcctggcgttcaaatgctaccagaacatcgacccaacagcggaagagaacactgaagcgtggaatgatatgtggttgaaggcttacgcgactgcattggtaaaacgccgttgggctgaagtgctcaaaaaagcccgaggcatccgtctccctggcgggatagaactggacggcgatagtatgttcagcgaggcagaggctgagatcgagcgtctggaggaagaattgcgtactggtcagcagtatcccatcgacttctttatgggataacaaaaagccggggtttcccggctttgttttagattttgatatctcgaggcccagggagcgaagtcgcctgaatatacccatcatggacgttattactgtcccaccattcaatgaaatcattcccgtcagattgttttaccaaaccgacgatatcataatcaccacctgagattttagcatccacacagatgattcttactcgacttccatcacgagtttccttgatgtcttcaacctgcattcgtcaattcctcaatagaattaaacatcgactaaataccttcaaaattgagggtatagtcatggccacttcaaaatatttcaactacacgaaccaccaaggcacgcagaagttaattgatgacctcgtggtggagatgatacaattacgtgggatcgacgtcaagtatattccacgcgccatttatgaaaaatacccaattttaaacgaggcagaacaccgtttcgaccaggcgtttgatattgaggtctatatgcaggattatcagggcttcaacacccaaatgtgggagaagttcggcggtatccagctacaagatgaggtgacatttactatcgcccgtcgccgctttgcggaagttattggcaacgggccaggactggatcaacaacctcaggaaggggatctcatttatcttccgatggcgaataaaatattcaaggtcaacaatccgaataatgacgaagacttcatgaaattcggtaaatggtacacgttttcattaccatgtaccttgttccagtatggcaacgaagacttcgatactggtgtccctgaaattgacgatattgataaacgtcttcaagatcttgaaggtgatggcatttatcaggatgccaccctacagacagacaaccagtttgctgatgagatcgaagaagatctgtctaccaataatgtcaaaatagactttggagaataaccatgagaccttttcagaattatttttaccatggttcactcctgaaatatatccatgtgttcaacgctattatgtctgacgttcaggtgaaaaccgagcgcggtcttatgaaggtcccgttacacatggctattggtcgtcgtaatgacctgaaccgaaatgttccggcgaatgcattaccatttgcgacgatgtctttcggtcaatttgaaatcaataaacaggtaacgaattcgtatcacaacaaattggcgactaatactgcgacgtctaagcaacgaattccaatcatcatcgactttgaatacaatgtgcgtacaaagaagatgaatgaaatgcttcagatcctcgaacagatttattctgtttacaccccttcaatagattgccagataaaggacaacgaaacgctcaagcaggatcaggttgtgaagatccaattggtgagccatacgatgtcagataactgggaaggggatgctgctgaatctcctcatgtcgattgtaatttcatgtttcagctccatggtgctatctatggctgggattattgggttgatgacggttccggtactggtgatccaaacgttatcaaggaaataattatcgaaatgtctactgatttgaatacaccgtggacggaattgcctctttggtttactgttgacaaagacggcgtccaccatccagaggatgattgattatgtctaatatgtcggaacgtttgttacagaccttagatgctgtctcagcacgagatgaggttgctcaagatgcgatgaagaaaaccgcattgaagcccggtgttgattatgatgaagaaacgggggagtggttaggtgatcccccggaagggtatcaaggattcgagatgccgccatcattgtctgaagtcgcatcaaaagaatcaaaagttcctgaatacgaggacactgatgccacgactgactacaaacgtattcgtgacaccacatatgctatgcaagaagccacgatgttcatgatgggcaaggccgctgaactcgccgcttctacagaggctcctcgtgcattcagcgtcttccgcgagctgggtgaactcatgcgtggtctcaataaagacctgatggaaaaccagaaaaccatcaaggatgttactcgcgacaaagagccgccgggacagaccaccgttgaggtttctgaagatgaaaatggaacgactacagtcaaagtcggcaagaccgctcggtcgtcaagagatcttctccagatgattgagaaagttcggcgtgatgccgaagccaatcgaaattctcgtgttaatcccgatgaagaagtaattgacgtcgcggaagaaccaaaacaggaagagaagtcagagggtgaggacgatggcgtatcagaaggcaattaatattttagaaaaggattatccagatatgtatcgcctaatcaggcgatacaattttgttgtccaaaaaggtttggtagaaacaggcggagaagttcatcatattctccctaaatccttgtatccatctttcacccaagataagggtaatttggttagattatcccccaaagcacatttcatttgccatttacttctttggaaaataactaacaccagagagatgctgttcgcgttcagttgtatgaagaacactatgggtgttttgagaacatctagattataccaagaatctaaacaagaattttattctaaaataagcaaattatcttcagaaaggatgaagtcagacaatccaatgttcaggaaggaagttagggagaaactttcgaaacgtaacaaaggatctgttgttagtcaagaacagaggtcaaaagcttctgactctttaaagaaaacgtggaaggaacaagggcatcctcgttctggggcaattatatccaaagagacaagggataaaatttctaagtctaacacagggaaaaatttgggtgaattaaatccattttatggtaaatctcatacagaagaatctaagaaggctatgagtgaaaagaaacttggattaatgccttgggaaatgaatagatttaatgaagaaaatatcccattctatttgaaatctgatattctatattccgcttggctgtctggattgaaaggggttgtgttgtgtagaaaggtctttggtaatgaccgatacataaattccatacaaccaataatcgctagattcaaaggtggttggaatccttctgaatgccctaagtggttgcagtggagaagccatcatggcctataaaaaagaaatagattgggcacctgagaaaacaggtttcaaaattcaagacgtcaaattgcgtatggaccaaacattcatgcgcaagccgactgtgcgtgctcctcgtgttgaattagtccttactgatgagcaggaagaagaatatgtcaagtgtgccatggacgcgcactacttcgctgcgaactattacaagattaccactatcgaccacggctttatcttgttcgacatgcacgattatcagaagcagttgttccatgatttccaggatcatcggttcaatgctgttgtgcaggctcgtcagtctggtaaatgtgttcggggcgattctgaagtttatgtttacgatactctcagccaggaagagttctctatcaccatagaggagcttcacagccgcttcgaggacgttaaccatgcagagccgttgaataccattggcaaacacaataagttcgtagacagccgcttcggcaaacgatactttgtgaagtctgacagtggttgggttcctgtaatcgcagcacacaagacaaaagaatatgcagaatatgtggtaaaaactgaaagtggccggacgattcatgtcgcggacgaacatttattctttaatgaatacgaccgtgaagtgttcgccaaagatctggaagccggggatgccatcatgacgcaagatggccttgaatgtatttctgaaatttgggaaaccggcgaatctcaccacatgtttgacctccaggtgaaatcatctgagcagcgttattacaccaatgggttcctgagccataatacgacagtggtggcggcatttctcctctggtacgcgatgttcaactctgacaaagagatcgcggttcttgcgaacaaagagaaacaggctattgaaatcctggaccgtattcgtaaagcatatcaggacatgccattcttcgtccagcaaggttgtgagaaatttggttcaactctgattgaattcgagaatggttcgaagatatttgcatacgcgacttcctcggactctatccgtggtcgttcagtatctctcctgtatgtggacgaagtcgcatttatcgaaaacgactttgaattctgggaatcaactttcccggcgatcgcccaggcagagacttcgaagtgtattctcaccagcacaccaaaaggtcagcgcgggctattttacgacatcgtcacgaaggcgaacccagaacatcctcaatacaacgacttcaatcttacggaagttccttggtacagggttccggcgtacaccaaagacccgaattgggaatccaaacaacgtgccaaacttggcgacgctcgtttcgatcaggaattcggtatcaagttccgtggttctgtcggttcattaataccgtcgaaatgtctggacaagatgacatccaagctgtatcaggagcctaacgagttcaccaaaatctacaaaccctttgacaaaaccagaacatattttggtattgcggatacaggcaaaggggttgagggggactactctgtgctgaccatattggacatcacggaatatcctcatacgattgcagccaaataccggaacaacacaataccgccaatgatgtatgcatacacgattgccgatatgtgtactcaatacggtgaatgtcctgtgcttgtagagactaacaatgatgttggtggtcaggtgatcacaatcctgtatcaagaaattgaatatccggaaatcgtgttcacgtcaacagacaataagggtactggtaagaagatcggcgggcgtcgtcctgaaccagggatcaacaccaacaagaaagttcgctctatcggttgtgctaacctgaaagcacttatcgaaagagagatgttggtaatagaagaccaggatacgattgatgaactgagtacattcgtgtttaccgggacccgttatgaggcagacgagggttgccatgatgactgcgttatgccacttgttttatattcatgggccgtgaaacaggaatggttcagtgatttaactgacaccagcatttcgagagatatgcgcggtcgtatgaatgcgatggagcaacaccaagtcctcccgtttgggggcaaatttactggtgatacccctcatgaagtacagcatatgccgggctttgggggtgtgaatgtatttgatgaacgttctgggatgtcaatggaagagtggttcaagaactgatcactaaatatctttcaaattgagcgaaactctaccgagaaggaataatgttatggcaactacaagtttcagcgttgcgccgtctgtacagtggaccgagcgcgatgccacgcttcagacgtctccgtccgttgttgttcagggcgcgtctgctggtaaattccaatggggtgaagtagaattgcccgtgttggttactagcggtgagactggtctggtgaagaaattcttcaaaccgaatgatgataccgcgatcgactttctggtcatcgctgactttatgtcgtacagttctgctgcatgggtgacccgtatcgtcggccctactgccaagaacgccgtgactaaaggtcagagcgcgatcctcatcaaaaacaaactggactttgagaccgcaagcccgtcggcttctatcacgtggactggtcgttatcccggttccctgggcaacgatatcgccgttaacatctgtgatgctgcgtcattcccgacctgggaattccgtaacaactttgcctatgctcctcaggctggcgaattccacgttgttattgtggacaaagttggccgtatcaccgattcttccggcgctgttggtcaggttgaccgtatttctatttctggtactgctaccgccgctggcgccatcacagtagcaggtgaatctgttgcatatctgcagacggataccccagcaactctggcggctaaaatcggcctggagatggaagcgctgactgatgtttattcgagcgttgttgtgaaatcgaataccgtcattctgacacacaaagctatcggcccgcagcctgttaccaccgtggttcctgatgccaatggtctgactgggactgctatcatcactactatcggtgcttctggtacgatcatcgagaaatatgaactgatgcagaatacccaaggcgcgaaaaagtctgatggtgctaatgcgtacttcaaagacgtgatcaacaacacttcgaattgggtttacaccttcactaatgccctggcggcaggtgtagttgaactcgaaggtggcgttgatgattacgacgtcaaccgtgtcgctgctatcgaagccctgaacaacgccgaagcatacgatgctaaacctgtgttcgcatactgtgaagaactgatcgaacagcaggctatcatcgatctgtcgactaaccgtaaagacacagtgtccttcgtgtcgccgctgcgtgatgttgtagtcggcaaccgtggtcgtgaaatggatgatgttgtggcttggcgtgaaagcctggtgcgcgattcttcctatttctttatggatgacaactgggcatacgtttacgacaagtacaacgacaaaatgcgctggatcccggcgtgtggcggtactgcaggtctgtgggcgcgtactattgagattgctggtatctataagtccccggcgttccataaccgtggcaaatacaacaattacaaccgtatggcgtggtctgcgtcttctgatgaacgtgccgtgctgtatcgcaaccagatcaacagcatcgtcaccttctccacagaaggcatcgtgctgtacggtgataagactggcctgacccgcccgtcggcgttcgatcgcattaacgtgcgcggcctgttcatcatggctgaacaaaacatcgctgccatcgccaaatactatcttggtgaaaacaacgatgcgttcactcgcagcctgtttagcaacgccgttcgtccttatatccgccagctggccaacatgggcgcgatctatgatggcaaagtgaagtgtgacgaagacaataacccggctgaagttattgctgccaaccagatggttgctggtatctggctgaaaccagaatacagcatcaactgggtctacttggattttgctgccgttcgtccggacatggaattctcggaaatcgaatccggcggcggtattgtcgcagcgtcataagacaccaaaccccgcttcggcggggttttacttcggggtaaataatatcggcaacccggagatttgaaatgatatttgcatacaaaattgaaatgatatctaacaacaaggtctacatcggtgtgaccaatgatccgcaaaggcgatatgagcaacatttggccaatgcatttcaatataatgttgaaagtgaattgtatgatgccatgcgcaaatatggggcttctgcttttactttcgtgattattgctcaaaccgatgaagtccacaaatgggaattggaaaagcaattaattgctcaatacgattcttatgaattgggctacaacatgaataaaggcggtaacgatggaagtcatctggttggtaaagctgctgctaaattgacctccactggagaacatattggtatggtctcattaattgatccacgttgggatctctgtgagattgaaccagtacggaacaatgttgatcatggctttgatctcagtaaattgacgatcaaaagattaacagactaattagaattgtgtaactctttttggagaatgtataatggctacagtaaatgaatttcgcgcggccatgtcacgtgggggcggcgttcaacgtcagcaccgctggcgtgtgactgtaaacttcccggcattcgtagcgggttctgacaccattcgtgacgtatctctgttggctgtaacaaccaacaccccgacaggccagctgggtgagattctcgttccgtggggtggccgtgaactgccgttccctggcgaccgtcgttttgaggctctgcctgtaacgttcatcaacgttgtagacaacgccccgtacaacgcatttgaaatctggcagcagtatatcaacggcagcaacaacaaccgtgcgtctgctaacccagatgattatttccgtgacatcatcatggaactgctggatgctaacgacaacgtcaccaagacctggacgctgcagggcggctggcctcagaacctcggtcagctggaactggatatgtctgctatggactcctatactcagttcaccgttgacctgcgttacttccaggccatttcggacaagtctctctaacgttacacgtggtgggggaatttatttccccaccactaattacaagaaaacgttgaggacatataatcatggcatacggcaaaggtttctttggtctgttcagcggcggcggtttagttgacgccaaagttgacacggacaaatatgtccagagtcaagaagagaagctgctttcaaaagcgactgttgtagctctggacgacgctcaggatggttcagtcatcctccagggcggggccaacacttacaattatgttggtgttgagagcgagctgcttaatgtcaaacagcttgttgaagaatatcagtccatggctcagcagcctgaaatccgcaaagcggtggacatcattattaacgacgttgtcacctgcgaagaagatgaaacgccggttactatcaatctcgataaagttgaaggcatcagtgaagatttgaaagaacaaatcacagaatgcttcaaagagattatgaatttgctggactttgacgacaccgcgtatcagaagattcgtaaatggtatgttgaaggccgtcaggcatatcatgttgtaactgacccgaccaagccgggtaacggcattcagaagctggtcatgcttgattctcgttgcatccgtccagtatacgtcgttgagaaaacaatgcgagaaggcggcatcgaggcaatcgaaaaggtcactctcaagtattactacaatccgaactacaaccgcaaccaattcactggtcaatctgggacatctcagaacttccagccgtctcaacaggaactggtgtttgacgaagaaagtatcgtctatgttgatagcggtgaagatcctttggcaaatggtgttgttcccggtctgctgaaccctgctatccgcccgctcaacaacctggttacggttgaggatgcgacggtaatttacgccatcacccgtgctcctgaaaaacgtgcattctatctggacgtcggtactctcggtaagaaatctgccgaagaatacatgactatgatgatgggtaaattcaaaaaccgtctggcgtttgaccgcagtactggtaagattacgggcaacagccatctgatggggattgctgaggactactggttgcctcgtcgtgaaggtcagaacgccactgagatttcaacagtcggtggtggcgaccaattaggacagatggaccacgtcaattacttccttgaaaaactgtatagctctctgtttattccaaagagtcgtatccaggaagaagggagcatcaatattggcggttctaatttggctgagatcacccaggaagaactgcggttcaataaattctgcgcaggtttgcgccgtcgttattctaaattcttctctgaatttttacgtcgtcagttaattttgaaaaagattactgacgaacaagattgggttgaaaaaattcaaccgtttgttacgtttgaattcacctcagacagttttatccgtgaacagcaagaaaatgaaatgcttgctggtcgcctcagtgccctgactgggattgagccttatatcggaacattcttctcaattgattatgcgatgcggaacattatgcgtatgtctgatgaagaaattaaggctcagcaagagaagatcaaagaagaaaaagataaaggaatgtatccgaaggttcaggctgatgaaagcggtgggtttagtggacaagatgttagcccgctgaaatggcgacctgaagtcgtacctttccagggtacgcccggcggagtagaagagtaaaaatttatcaactaaatatagaaaattaacttcggagatacaatcatgagcgcgatcgatattgttcgagccgtactggatggtgacatcgaaaatgccacggcagaatgtggtatggaacttgatgcccgccgtgaagaactgattgctcagggtacagaatacgttctgaattccctgggtgacgacctcagcactggcgcggaataggtgattaatatggaaatcaaagaaattgccacgttcgctgatttcctggcttcccgcatggacgaacagaaagtcatcgataaagtgaacgcaaaaggtaaacgccgccgtcgtttaaaatgcgctcccggattcaaactttccgctgatggttctcgttgtgaagtcatgaacgccagcgagcgccgttcccgtaaactgggcaaccggaaagccatacgcgccaaaaaacgtatgggtctggggtatgaacgcaaagtcgagcggcgtaaaaagaaagccatgaagttccgtaaaatgatgggactgagtaagtaaggagcaaatgatgaaactgttgcgtgagatcacggcgataggaaaggaacttcagatcggggaagcgcaaacttccactggtgggaaggccatgttcatcgaaggtccgtttgtgatgtgtaaccaggttaaccgcaacgggcgcaactacgaccttgaaaaagtcggtcgccctgctgtggaagcatatgaccgggaatacattcaagatcgtcgcgcaatcggtgaactcaagcatcctgactatccatttcctgatatcgaacatgccgccctcaaaaccgagtcactcgtgtggcaaggcaacaatgcaatcgggcgggcgcgtattttaaacacccccaaaggtcagatcatccgtgctctggctgatgcggacttcaacctggctgtctctacacgtggcctgggtgagacagtagaagttaacggctatgatgatgtcaagccgggcttcatgcttaccgctgttgatgctgtcgaccgtccttctggacaagtttgttatgtaaaagcggttcacgaatctgtagactggcaacttgatgaatcctcgggtatctggatgcctcgggacatcaaaggtcaggttgtagacaatctggttaaacataatagccagcttgaagacgacttcctgcgccgtcttgatttagctcttaaaaaattgggttgatttcagctcactaaatactgaaaaatcgttcagaaggaaattatcatgaaacctgaattacaaaaactgtttgagggcgttaatggcctcagcaccgagttcctggacaaagtgagcggtctgatggaggctaaagtcggcgaagcccgtcttcaggctatccaagagactgaacatgttgcccaccaggaacgtctgaaactggtggaagcgcatcagcaagaaatcgctaacctgaaagaaactcatattcaggaagtggcgaccaaagttgatgcattcctgaatgccgtggttgaagaatgggcgaacaaaaatgctccggctattgacgctaccatcaaaaccgaagcggctgaaaaattcctgtctggtatggtcaacgtgctgaaagaagccaacgttgaatttactgtagacaccgacggccagatcgcggccctgactcatcgtctggcggaagcagaaaaacgtgcaaacatttctgaatccgagctgaaacagatccgcgaacaagaaagtatccgccagcgcaataacgtcattgacgaaatttgcgaaggcatggtcagtaccaaaaaagaagtcgttgttggccttctggaaggtattcaattttctgacgcctcttccttcggcgctcgcgtccgcaccttccgcaacctggtagaaggtaacaaagacgactttactgacaaagtcggtaaagacaacgaaggtggtaaatcttctgatgataaggaaaaagacatcaaagaaggcaaaaaacagaaaaaagaaggcgacgatcctgatgatgacgatgacgacaacgacgatgaccctgatgaaaccgacaaagaactgaaagagtcggtcagccgtcagctggaagaataccgtcgtatgcgtggtctgaaaggctaaattttgcagccacagccctctataaaagggggcttgattttgaacgactaagtaatttcaacttaactgaatatcaatgtaaggaatgagcatcatggctaagaaacttgttactgaacaaatgcgcgaaacgtggctgccggttctgaatgaagaatccaaatctattcagccgctgtctgcagaaaacgtcgcggttcgcctgctgcagaaccaggccgaatggaacgccaaaaacctgggcgaatccgaagcgccgggttctctgaacactactgtcggtaaatggcaaccggttctgatcgatatggcaaaacgtctggcgccgatcaacatcgcgatggacttcttcggcgttcagccgctgtctggtccggacggtcagatcttcgcactgcgtgctcgccagggcgttgctgacggttctaacacccagcagtcccgtaaagaactgttcatgcaggaagccgattccggttattctggtgacggtactgtacaggctggcgacccgtctggcttcacccaggctgagatcgaaggttccggcgctggcaccaccaccatcggtaaaggtatgccgtcgaccgacgctgaactgctgggctctccgtccaatccgtgggcgcgtgttggtatcaccgttcaaaaagcgaccgttactgcgaaatctcgcggcctgtacgctgattacagccacgaactgcgccaggacatgatggcgatccacggcgaagacgtggacaacattctgtccgacgtgatggtaactgaaattcaggcggaaatgaaccgcgaattcatccgcaccatgaacttcagcgcagtgcgtttcaaaaaattcggcaccaacggtatcgtagacatcgctcaggatatctccggtcgttgggcgctggaaaaatggaaattcctgaccttcatcctggaagttgaagcgaacggcatcggcgttgacacccgtcgtggtaaaggcaaccgtgttctgtgttccccgaacgtagcatctgcgctggcaatgtccggcatgctggattacgctccggttctgcaggaaaacaccaagctggcggttgacccgactggtcagacctttgcgggcgttctgtccaacggtatgcgcgtctatatcgacccgtatgcagtagcagaatatatcaccctggcgtacaaaggcgcaaccgcgctggatgctggtatcttcttcgcaccttacgtgccgctggaaatgtaccgcacccagggtgaaagcaccttcgcaccgcgtatggcgttcaaaacccgttacggtatctgcgcgaacccgttcgtacagatcccggctacccaagacccgcaagtatacgttacttccgatggcattgcccaggatagtaacccttatttccgtaagggcttaatcaagtcgcttttctaatagaaacaacgacttacaaaccccgcttcggcggggtttttatttgctcaaatttatttattgaatcactttacttcttcaataaccttccttatacttcaatccatagcagtaatacaccaacttgaaacgaaggaactacaccatgactaaatctgaaatcaacgcaatcctgaaagacctcggttacggcagcatgaagatgagagcaggtctgtatgagactcctaaatgtgctcgcaaccgtcagggtaaaatgatcaaaggcatttggtgtggtgacgtaggcccaactacggtgacctctcctcacctgaacgggtacgaaaaagtcgtccgcgagttctgtaacaaagtgtgtggccgggtggatgagtccctgtccacccacgacttgaaggtagtagtatttggcgacaacctggtgtcattcaccctcagcagctacccatatggtggtgattatgaccgctactacgcgatcgtgacaatccgcaaataacccaccccgccacgtggcggggtttttctttatacgccctcagtgctattatattatggtctatcactgaggaaacaaatcatgaatctgtcaggagcagcaattgatgttctataccaacttttctggtttgggccaagagaagctggtgaaattccgtctaaatctggtgagttggaattgttgtctaaagggttgtgcgaaagattagatctggtttctacacccaaaggcaaagatactcatctctgcgttttgactccaaatggttacatccaatcccgcgctcttttcgtccattccaacaaacaggaaatcaaatcatgaacacaaccaatattcaattgtcaatctcttccctgatcccagcgttcggcaacaatctggaacaaatcacttacatccgtaatcggctggaagatgtggcgttccaattggggtatgtggaacctcctcgggaagtaaaagaagcggaggatgctgcggcaccttccaacctcatcgatgtgtatgatgaaatcgggcgtaaaacgaacgccgtcatacagcaaatttttgaatatatcgggtttatagaaaaagcgctggggaattcttaccacccccagtctgatttggtcaaggaaattggtccaacatctaatggcatttaaaagaagggcgcagttgcgcccttttatttggggggttttatgtactcaaatatctcaaactctgaagccctgtctttggctaaacgataccattgcttcaggtcccgcgccgggcattcctgggataaaaaggcttggatcaagcaattacagatacaaatagagataatggaatctctatccactcagtgcggaaataacccattcgctgcccgttgccttgaacaggagtatgcaactcttaaaatgcaactgaacactgcgatgtcacacgttttgcactcttaacttttcaataaacagatttcaattattattcacccacaatctaaacgaggaacaactgatggcccgcgaagacaattcacagatttctaccaacgccaactcaaccttcaatgagtggcacaacacccttgagcgcgtagcacgttctcaaggcggttcagcagctgatgccgatgcctggcgtgaagattatgacaacggcaaaacgccgcgccaggcatgggaagacgaatgggggtgggaagatgcagacactaattcgtaaaatctttctggataaaaaggggatggaatcaaaggtcgaaatcatcacgactcaaaaattgtttgagaaaggtgaaactcgatactatcttaatgtgttcctttaccttccagaatgcagcctgaaccgcgatattacccaaccggatggaactgtggtccgttgggaaatagccaaacaggaagatgttgaaaaagacatatcactttgaagcgagatctatatcatgacaaataaattcatttttctggacgttcgcggtaaacgattcttcaaaactgatctggacgaaaagacagaagggttccaggggcgtttatcatatttgttgccgacaggcgatatcgacacccaaagatatgtggcggatgtacgggatctcctggattgtggttgggttgaaattcctaacccccaggtgttgaccgtcaatctgtattacatgaaggaaagtgggaagtattattccaatggagaactccacctccttcgttctgaagtcactgccgatccagccaagagttggtacaatgctagagaaaccgtccggaagatggttgatgaaggcaatttgcctggcctggtatctggttctcgttacgatgtgttcatgtcctgtgaagagcatccgtgttatgtgcccactttggtgaaggtgaaatgatgaaaactctcgaacaaattttagaaggtcataaaacaggaactttgtcggcggctttagacggtcgcgatttgacccgtctggcacagtttttgacagttgagcaaattgaaagcctgggactgtcttttaaatctcctgaaaaacgtgaatcccatgtcccggttgaattcaccaaagaaaatatcctgaaacaactggaaaaggacgtcgcctttgggtttgaaaaggctctgaatcatcgtgggattagttctagccttatgtacgaagtcgtacaaatgtggaactgtatccttgaagaaggcctcgaagattttgattcgtatgcgatgtacggccttcctctgtttaaagcaactgctgtcaaatacgggtttgacaacccaatcggtgatgacacaggtgccgaagatcattatgaagagcagggctattaatatgcgtatcaaaaagatcggatccagcccgctgactggtactatcttctacggcaccctggaaaccaaaaccagcatgtgggtaggggaaaaggttgatgtgaccaatgattgtgttgcggctacggctgagcacatgcgttgtgttgggaaggattattgtttcccgactttggacggtaaattcttggtgttatcagctgaaattcacgatacccttccggaccgcttcaaatagatttaaaaataattcaataaacggggtttacttcttcaataaaccccgtatacttcatttcataagcagtacgacaccaaccctgaaatgaaggaactatatcatgaacaatacaccaaccactaaaacccctctggccatcgatcctcggtttatcattgaagcaaaagcgaaccaaatgggtgcctatgtgtactccctgtatatcggtgaaacatacgttctctgtttgggtatagacggcgagaagaatgagcgcggtgtccgtgagcgttatatccccaaaaacgcagatgaagatgcgaccagatttgccaagcacatcctagaccgcattgcagcgggaaagccgtataaaaacggggaaaggggatgggcgacggatctgctgaataaagcgtaagtattcaatgtattctatcagggtatgattcgttttataccatcaacaaatagttgaggcttcaccatggcgaacaaaactatagcgacttctctaccacctttagattttagtttagaccaatcccataaacatcgtctgtctatccattatcgtatagcggcggcggtatcagatggcagggagacaattgagttttaccgacctgccacttcggccaaagctcatcgtgatacttatgttattttgcgtgaattacgtgaacttggggttgatattgaacccatgccgtgtagtaatcctttgcttaatctcttcgttttgagcaacttcgagaattggaaatgaagaccattattctcataactggttcgcgttctattacagagcgcgacaaaatctttgaaaagttagacgaactttctcatacagattccgtttgtaatctgtatcttccgtgcgagaccctattgatcgctggggaggctgtcggcgtcgatacgatctgcaaagattgggctgagtctagaggggtgacttatcttgggatgcctatccccgatgaatacttcgctacatatgggaaaggggctggaaacaaacgcaaccaggacatgttagacaaggcgttggagttatcacagaaatacaaggcggagatactgcctctggctttctgggacggttcatcgactggtacacaggatatgatcaaacgaatcaacaaagcagggttgtattgtaaggtcatgctcttgggtaagccaaaaaccaaacgccttctgtaatttgttaacactggagacttcccatgatcatttttcaactgttttgctatttgttcactctgtacttcctggttgctgtcggttatgaaaccttccgtgatctcgcatcgagccagtattcgtctaaactggtttatgctaagaaatttgctgtccgtttctggagcaattttctgtatcgcctcccctgatttaaatacccccatcaattgggggtattttcttatgaatgcacaaatctatgacgcactagagcaaggcaacgcctttaccaacccgctcccgggattctctgctacttctcagacgttaatcaccagtggccaacaaagtatagcaggcattacaagcatcccggatacgtccgttcaggcggcgataaccgctggtggtttgactcctgctaaactcaataccattaacaccatgtacgggactgccaacaccgggatcgggactctgaattcttatggtgaccagaccgttaatgaggcatacaataggatcggaacttcagtatcctataaatccggcctcaaaagtattgaacgagaacccaccaactgcgatttgataaacaacgcattcggtgtcgtacagacactcggtcgtcaatggttgactgcaatagaggatgctttatctccaataacagacaaaatccaagaactgtatgatctggccaaacaaggcgcggcggcggggttggccaaaatacaggcattagcctcacaggtcaacggattaatcaatgacgctgtagcaaaggtgaatggtgttattcagaacatcactgatgggatagctgctgagttagcccatattgaagacatggtgaagaagtgtcttaatttctcctttgctaatgttcttggtgaatgggcaaaagatatttgcgctggcggtgtcatcaacaatatcggttctaatgatctgaaaaatgccctgaaatgatcagggcacagtccttgctggcagaactcccactggctcaataccttccaccagaagggagttcacgcctacatcgctcaacctaatccatatcttcccaccaggcttaatttcaaaaacgttcatttcatttccaaccgcttcattattcacaaatacaccttgtgttgctatccttacaggtttcttcgtgttgtttgtgatttgaaatgtaacagttatatccgtggtcagattaactccctgtctcatggtgtaacgttttattttgtcgtagaaagatgggttgaatgtgatgatgatgctgttgttctgtgagtaataaatacttgctgacaagtaaggaattttgccttcttcccctttgcgtaaaagagggatggtggttttccagtatggtcgcaaagtgtctttattatcaaaacaaccgacaggctggagattttggaaactttgaaacaaaatagtggcctcatccagcatggatttttcacatttgttactgtctgttgaaatggttactggtacaacacggacatcagtatcccagaggtcactaacggaaatgatgggcgtgacgaaaatacggcaacttgtcaacacaagtaccataaaaatcaccacaatccatcttctgattccgcgcatcagggacacaattattctccacggtaaaggtgctaacaatgtctacttcagtccaatttaaacatgacaacccaaattatgcagcatccgataagtggcgcttaactatcggtgacctgatattgttatcccgctctgtacacgattttagtataccaggcgtgtattccgagggcatcgatgggccttcgcccggttcagtgctcaacacgatcccttctgaacgtttaacatatgatcccatcgtatttacgttcgttatcgatgaggattgggtaaactgggaaaccatctacaactggatagccagcaacgccgccgctgatatggctgttagcaaagacatcaccatagaattactcaacaacatgaaccgcccggttggcctgcaacttctgttggaagaagcccgcccgactgcattggacaacgttcttgttgatgtggacgcttctgttccccaattagttacaacggtgactttcaagtatctgaaactgacaccgacccgtgttgtccgcgaaattgataaagaatgagttataatagagagagttgaaaaggtgggaatattttatggaagttaacaacactcaataccaaacgatgtctatagaggacatcatggctgaactggatccactgattacggttgatccagctgatcgtaatttagatcagatttcgttgaagatcggacgttcctttatgacagtgcagcggcattacattcgtgaagggcgttatctggaatatctgactgggcggtttaaacagattgatgtttatctgcgcaggtattatgccggggaattacctgcgcaatcgtatcgcgaacgccctctcaacaacaaaccactgaaaactgatctgcctttatgggttcaggccgatgatatgtatgttgagatgtcagggcttctacaagaacagaaagcgaaggtgaaattcatcgaaagttgtttggatcgtttgaacaagctgggttatgaagtcaaaaacgccatagattggaggaaatatctcgatggcatgtgacagaacaccatatgtatatcgaatcgtatccatatatggtgagatttatattggttctcgtactgctaagaaatgcgacccgagggaattttgggtcacatatttcacatcttcaaaagttgtacactccttaatcgataaatttggttatgattattttaatattgaacatatagaaatattcaacactaccgaagacgcatacaggacagaacaaaaacgcataaaagatatttggggatcagaaaaattacttaatcgacatttccaagatgatgataaagatatttggctcaccacaagtttaccagcggaacgaaatccgatgttcggtaggactggggacaaacatccattatatgggaaagtcggagccatgaaaggcaaaacagggaaagaacatcctatgttcggccgcagattcccaggaatgaatgctggagaaaagaattattggtatggaaaatcttcacccatgaaaggttgtgttccttgggagaacccatcggctataaaatatggtactgtgaaaatgtggttatctgcagacacagcattttgtttttggaaagaacataatgtgggttattctaaacttagccaagctacaaacatttcagaaggagtttgtagtagtatgatagctagatttaaagctggatggaacccgttagaagatttagattggatcatttttaaaaggaaacaaggatgagccaactccaggtactcaagaagatcaacaatattgaggaacgtcaatatacatttcagcagtacgaattaccgtacaaggagctgacttgtgtaacgaacgagaatggacgccattacgtttccccaacaggggtgaagttaacctctgtaacaacaatgttggggcgtaccagtgaccatacatggttggatgcctgggtcgaaaggcttggagttgaagaagccgcagctgaaactcaaagatgcgctgacaggggagaggcagtgcatcttgcttgtgagttatatctgaagaatgcaccgatgaaagatgttgtggccgccgccggacaatatctgttcatgttcatgcaattgtttccctatctgaaccgcatgacaaagatatatgctcaagaaatccctctatatagcgaagtattgggcttggccgggcgtgtggatttaatcggggtgtacaacggaaccccagcaattatcgacttcaagacttccaatactctgaaaaccagggacatgatagaggattacagcatccaattgtgtctgtattcagttatgtttcaacagatgtttaatgtcaaaatcgagcgtctcatcaacatcatatccaatgagaatggtttactgccgacagtaatagaattcgacagaaaagatattctcccaaaaatgttcgagcgcgtccgtttatatcaccgtatggacaaggaacagaatggaatctgggcagaccgctaaatactccatataattgggaggattggtatggccgacatttctgtgtccaaagtgaacgaagtccgtatgcgtgtgcatgctgacgcagggatctatgaagaactaaatgattacttcaaatttgaagatcccaactttcagcctaatcctttcagcaaatgggatggcgtcgtccgcctatttaccaaatcttccggcctgatcgacatcggtcttctgtttgaactcttcaaattttgtaagaccaacggttattcacttgacgtggatcctgcattgaaatatatacaggacattcctgataatgaaatccatgatttctgtaataatttgaaaacacaaattcgcacagaatctggggaatacattgatgctgaagttcggcagtatcaattcgattccatcgccactgccatgaggcaatctcgctgcgtcctcgagctggctacaagtgccggtaaatcctttattctttatgtgatggcccgttactacagggaaaggcgagaagcgctcgaaagtaatctgaggacgcttatcgttgttccttccgtacaccttgtaagacaattgtacgagaacttcgaagaatatagccatggacaatcctggaacccgttctaccaggtacaaaccatatgcgaaggcgcaacccgtaatattgacaagcctatcacaatttccacatggcaaggcatacaagaccagccaaaggattggtttcatcagtttggcgatatcattgttgatgaagtgcatacttcaaagtcagataaactttcatatatcctcaataactgtataaatgcagaccagcgccttggggttactggcactttggcgaacactaaagttgctggtctacaggtggtatcccactttggtgcctatcacaagatcatcacggctcgagacctgatcagtatgggatatgcggctgacattaaaatccggatgatagaattgaaacacagattggccgacgctattgatatgcatggtgccgattatcagaaagaaatggaatatttgatatcgaacgaagttagaaaccggcttatcgccaagatggctttaacattgaagggtaacgtcgccatcatgttcgaacgtattgatgcacatatgatgatcgtgtatgacatcctcaaagaaataaagcccaacgtatttgtcatcaacggggaagtcaaatcagcagaccgcatgcaaatacaaagggcgatagaagaaggtgaggatattactctgttggcatcttatggaacgatgcaacaaggggtttctataaagaaacttcaccatctggtattggcacacccaagcaaatcatatatccgcgtcatccagactctgggacggttgatgcgtcagcactcaacaaaagacgtggcactcatatgggatttggtggacaatttgagttataatgggagttacaatcatgcgttgcgtcactctcacgagcgatacaaattctatttaacagagcgccaccctgttgaattgaaaagagtggcgctggaagattatttgggatcttgatccacataggcgggcgtcggctcgccttcttcgctggcgtcaaccaaacccaggaaggcgtcgatactatcacaacaacgttgtaacagttccggcttgatggttttgttgatgatcgcctgatttttgttgaccagagggaacactcttaattcgccgaagttgctcatattgacgatcgcaacataaagccctggcttggtattacccgacaggaatgagaatgggacttccttggcagtgtctgatttcgtttcatcaactaaaactttcaaaagagtagtggttgttgtctcactacccaatttccggcttgccatatctccgtggctgtaccctacggcatagattgctactagttgtttcatgctattcgtctcgtgttgtttgcatccttatataatagtctcatgttatgtttagaccaatttaaaataatttgcctttcggattaaaaagtcctttcttgttgaacaaatccgtcgtactatacgagttgtgagctttgcgagcaacgagtattaggggtttacgagcgaagcgagttgattaatataaattaatagattaatctatttcgttaataatttgcgcgcgaagagatttaacacttgttctatatccccaaatgggcgatactaaattgcgtcaacaacatgacttgacttcactatatcttgaggatacataaatgcaagaaattactctgtcggaacgcactctgcaacttctggctaactttgaaaccatctgtccgtctatcgtcctgacccctggcaaaaagctgcgtaccgtaaatgacgcatcgacggttatcgccatcgccgatattgacgaagacttcccgttcgaattcccgatcctcgacctgaccaagctgctggccatccagcgcctgccgagtttcaagagcggtaagatcgaaatgtacgaagatcacgtgctgctcaaaggcgaaaactctcaactgcaattctggcgctcggccaaagaactgacgactgttccggctgataccattgatctgccgtcggttgatttcgaagcaactgtgtcgccggaaaaaatgaaagagctgatccgcgcgtgttctaccctgggccacaaaactgtccgcatggtcgccagcggcggcaaaacccgtctggtgggtactactccggcgatcgacaattccaacgattacaccgttgaattgggcgaaactgcgctgggtgatttctccatgccgatcgacgttgtcaacctgaaaatgatcgaaggcaactatactatccgcgcctgcactgaaatgcagctggtcaatttccaatcggtcgacggcaccatcaactattacgtcggcatgcagctggaataatcttcaatatctgtctgttgctttaatatcgttgcaggggcggaaagcccctgtattttgaaacgcatcatctaaagaggctgtaatgtctaatatcacaatcgttggtgaccaatacgcatgggaaaacaaatatcgtccggacaatctggacgaaatcgttcttccccaggacgtccgcgccaagatccatggctatatcactggtggtaatggcaacatcccgtcaatgctgttctactcaccgaaaccgggtactggtaagaccacgactgctctggcggtttgtaatgaaatcggctgtgtcaagccgctgatgatcaacgcatccctggacaacaacatcgacaccatccgcgacaaagttatccagtattcgactggcgtcagcgtatatggcggacggaaagtcgttatcctggatgaagccgagcgcctgtctatggccgcccaggaatcgttgaaaggtattatcgagaaggtgagcaaaaactgctcgtttatcctcaccaccaactccaaatcccgtctgaacgaaccgctggtttcccgctgccgtgaaatcgacttcatctggaccgacaaagaagcacatgaagtgcagctacagttcatgcggcgctgtgctgaaatccttgctgctgaaaacgtcgaagtcgatctgaaagtcctcggtcggatcattcctcagttcttcccggacaaccgtaagatcatgggcatcttgcaagacaatgcctccacctacggaaaaattgatgaacgcgctttggccgtcgtcaacgcaggcggtatgcgccagctggttgaagagatgaagcgtaacaactgggacggcgttcgccaatgggtgactgataatcagaactacatcggcgatgatttctattcccgtttcttccatttctgtgtgccgcaggataaggacaagccacgggctatcgaaacgactagcatcgtcgatatggtcgctctctgcgggcaggcgcagattgaacacagacaggctggtgacgtttggctgcatgcggtttatttcctgaccaacgtcatgctcaacattaagtggagctgattatggccgctccgtctttgttcgatttcctgggtgcgttgaacaacaccaaagagaacctcttgcaaacggacgaccctgatgttcgtaaggcttttgatccgtttatgacccggcgcgggctggcacagaacaaagatactcttgtcatcgcccagcgaatgaatttgcttcacaaggtcacgccgtggatgcaatggaatatggcattccattctatcccggcccgcaagcggtatgggaagtgggccaaaaaaggtccgctcgaccctgatattcagatgttgtctgagtattattacatcagccatgaaaaggcatcagagtatctcaaatttcttccaaaagaagcactggccgagatcaggaagaaagttgagttgtctaacagcaacgagaaagcgaagccgcgcaaggctaagtagttaaaatcattaatgaaggagtttggtcatggcgcgcaatacgctcgacatcttaaaactgactgcggtcgacgatgaggccagcatcgtcgattgtatggtcgaagttgaacttaaccaagataaaccgggaattttcctgggtatcaaggaaacactgagccgaatcggggttaatactcgccaagagcctgaaaccctgtatcagacctgccatatcctccacaaatctggcaagtattttatcgtccatttcaagcatctgtttatgctggatgggcattacaacggctttcagcgtgaagatgtcctgcgtatgaatcgcatcattcgtcttctggagcagtggaagatgattaaggttctgcatccggaacaagtaaccgaatgcgccgacatgtcccgtatcaaagttgtgaaacacgatcagatcgctgattggaaactggttcccaaatatatcattcgcccatctcgggccaaaagcgaataactggagtcgctatattatgacaactacatttagtaagaacgtgagactgaatctggcttttggtaatgctaaaggggacgtaaccgcccccgactttagcaaaattcgcaatcaggcgaaactcgttctggaagaaacccgcgaactcctggaagcggcgtatttcgatcatcaagtagttctgacattggaacttaatcctcgggaaagtgaaacgccgaccactactgaagatctgatgaaagccatcatggatgcgcagggtgatatcaccacagtcaacgacggcgtagctcatattgctggtttcgacggtgatgaatgcttgcagcgcgtctttgcttccaacatgagcaagttcatccgttctgaagatgaagtcggcccggcgctggactactactattcccgtggtttcccggaaggccagctgcgcgttgaaggcgaattcccccaggcatgcatcaaggttaatgaaaccgtgatgtggaaaggtaaagaatatccggctggcaaattcctgaagaacatggcggtcttccaggaaccggatttcagtgacatgttgacggatagcccaaaacaacagatcaaaaccatcatttctagccaaacagcacaaaagggaaaggtttttgtagaccacaaaatgggtgttgcttattttcataccgatgacctcggccctttcctgggcgagcaaactggtggtgctatcgaaaatgttgttgacatgcaaggccagacagaaagttatgtccccgtataccaagttggtggcgaaaaatatccggcgctagaaggcatttgggcggcgaacgtccgtgtgtttgtgtactccccgtacaacccggaagtcacgcagctgacccgaatcgattaagactctcagcgtttcaataaacaacagaggctataatggcctctgttttcgtattctaagaagaggataccatgaaagacaaacagtcagacatccaatattgcggtgtccgtgcagataaaatcaaatcagctgaaccaattctcagcccctttcatcgtaagctgtcgtatgaatggatgagcgaacgttacaaaatccacgtaagaaaggacgtccagcgccttccttctccctggacagaaaacgagatactacggcaggtcaagttctgtaacgtccggagagagcacgacaggcagtctcagcacctcatccggaatatcatcgagaacaacaacctgtctctggccgacaagatgttcaactgccttctgttccgtatgttcaacatgtgggatcccatccagcatgttctggaaggcccggtctccatcaatgatttccgtaatatcaatttagatcgaactcgtgaacggtttgcggactttgacaaaaaaggcggcgtgacattcaccaatgctttcaacacgggcgggctgaaacaatgtctggccttccctgaactggccgtaacaggtaagcccgccagccccagcaaaatgatggtgaaagtttatcgccgggggataggtgttgttgacgtccttccttacaaggtcgcaaaacaaatggtggaagatcatccgggtgaatacagcatcgaagggtgggaaccgcatatggggatgcgcgttgtccggttcctgaaatcgtttgttacccataaccctcatttcttccattcgttgttggggttcaattcaccgctatctgtttatgaagaattacgcgataaagtagaaggtctcggaccattcttggcatatcaggtttgggttgacttcacgtacaacccggattatccgtttagtgaaaaccatttcactatcgccgggccggggtgccgcgccgggattgatctgttgttcctggacaaagatggtatgacccacgaagagtgtatcttctggctccgtgataaccaggatcaagtctacgggcaatatggttatgttcgtgaacaattctggtcggctgaagcaccggaagatcaatgcatgaacgtcatgcagctggaaaatatgttctgtgaactgagcaaatatacccgttgtgtcgaggcggttatgcgtggtgagaagcctcgtggtaaggttggatatgacggaagcggcgattataaaaagcgttgcgacgaagttgttctcaaccgtagttctgtcaatcttctggaaaggatgaagaaatgagttggaaattattcaagttacgcaaagccacagatgaattcctactggaagctcgtatgcaaggtcgtcttgtgtacacgccttatccaggaaccacgcgcttttgcaatacgttaagaaaacagaattctgtttctggtcctagaagattgatgaaccagggaatgttggcatacaactctggggatacccggccttgtgacggtgggaagataatctgagccaatatgatactggaataaagttttcaataactgtaatcggggtatattgacctcactttaacgaagcgcctcaatcggggcgcacatttgaactgaaacaggaagactatatcatgtcagattttaaacccttcgcagttgccgtaaagaatcaaatcaccgcgatgtccagcaatggcctgtacatgacttcggttgacaaagacgccctgtgggatctgtacctgtcatctttcccggaaggcaccaacaatatctaccgtgagcgcactgagcacgattgcacctgctgcaagcaattcatccgtaacatcggcggcgtcgtatcgattgacgctgatctgaacctggttactgtgtgggacagcgtcaatctgggtaacgaatacgacgtggtggcggcagcgctggccaaatatgtcaagcagcacaacatcgtcggcgtctacttcaacgattctgctaaggtgggcgtagaaagcaaccacgaaatgggcgctggcggtgtagtgcgcacgtataaccatttccacgccgttctgaacaataaattcgtcctgcgcggcgaagatatcgcctccaccaaaggcgaaatttcccaatccattgaagtgtttgagcgcagcatgcgtgagctgactatggaatcggctgaaatcgtcctggaactgatcgatcagaattctctgtatcgcggcgaagagcatcgttcggctgtacaaagttttgtgcagagcaaaaccgaatacatgaaaattcgctccgatctgaaacaactttgggcctggcgaactggttggttgtccaaaaaccataagccgtttggcatccgtaacactgtcatcggcaccctgctgactgatctgtctgacggtgttgaaatggaaaaggcggtgaaatcctttgaaaccaaagttgccccgaccaactaccgccgcccgactgccttggtcaccaaaggtatgatcgaaaaggcgcagaaaacggttgccgaactcggcctgactgaatctttgggtcgccgctatgcgaagtatgaagacctgacgatcaacaacgtgctgttcgccgatatcgatgcgcggaaagctatggatccgttcgatcaactggcgcaggaagtcaaagtgactgaaaagtcgctgggtaaaatcgaagagatcagcgtcgatgatttcatcaaaaacgttatcccgaaagcgcgttccatggaagtgatgttcgaaggccgtcataccgccaacctgatgtctctggtcgctccggaaactcaaggcgctccgaacctgttcaaatggggtaataatttctcctggtcctacaacggtgaagtcgctgattccatcaaagagcgcgtgaaagccgctggcggtaacgttgattcattcctgcgcatttcgctggcctggttcaacaatgacgacctagacctgcacatgtacactccgacgaacgaacacatttatttctctcgcggttgccgccgttcttaccatactggcggtgagttggatattgacatgaacggtatggatgggatcaacaaagagcgtaaaccggttgagaacatcttcttcaaagacaagaacatgctgcgtgatggcgtgtaccgtttcatcgtcgacaactatgcccagcgtgaaaccatcgacaccgggttcatcgttgaggtggaatatgaaggcgacctgaaacgtttctcctgtgaaaaaggtctgaagaataaacagcagatgaccgtcgttgaactgcgcgtcaaagacaaaaaggttgttgaaattcagtcttccctggtgccgacgactggtgtggaaactgaaatttggggtatccgtacccagaatttccagaaggtgcaactggtcctgaattctccgaaccactgggacggtgaacagaccgggaaccgccacctgttctttatcctggaaggttgtatcaacccggccagcactcgcggcttctacaatgaatatctgaagccggaattggcaccgcatggtaaggtttttgaaatgttgggcgctaaaatgagagcagaaccgagtgataagcaactcagcggcctgggcttctcttctactcagcgcaattatgttctggtgaaggtaagcggttcatttaatcgtgtagtcaaagtcgtcttttaagttaaaatataaccgaattcaattgaggatacaaaaatgtttgataaagcaacccgtctgaaactgcgtttcaactccaacaaaggccagctgtccgttgagcaggtgtgggatctgagcctgactgctctgaacgaaatggcgaaaggtctgagccgcgaactgaaagccgctgcggtcgacgatgaagatttcatcggcaacaatacatccgtcgactctcagctgcaactgcgctttgacatcgtcaaaagcatcatcagcaccaagctgaaagagcgcgatgacagcctgtccgctgcagaaaaacgtgagcacaaccaggttatcctggaactcatcaagaagaaacagcaggaagagctggcgggcaaatctgttgaagaactgcaagccctgctgaaataaatccgtcaactccggtcttaacaaccccgccctgtgcggggtttcaatttgtgtatcgcagtataatacatatgtaaactaaactatggggctacgttatgtttcgtttgagattgaacgaccaagatgtgttctacaaacacttcacctttccaggcggtgaggaacatatcaagattcaaaaggcgggtatccctgttggtaaaatccagacagtggtaattgacgcccacattaaatcgtcagcagacttcattgagttggcactgttggtgaatgccgtgcgcggcctgggtaatgtcgaccgactgacaacttttcatgcttatatcccttattttccatatgcccgtcaggatcgtcattgcgattttggtgaacctctttcggtgaagtgggcagcagagttcatcaatagtatgaactttgaccgtgtggcgatcaaagaccctcacagccatgttgtgtcttctctgatcaacaacgtccatgttgtcccgcaagattacattgctcgccagtacctgggatggttcattcggggcaacaacgctgtgttggtagctcccgacggcggcgcagcgaagaagactgaaaccctcagtctatcgctggatggcgttcctgttgtctacggacataagaaccgcgacaccaagacaggcgagatcattggggtgagtattacaaaccctgaactgatcaaagaccgctatctggttgtggtagatgatatctgtgacggcgggcgaacgtttgttgagctgggcaaagagcttcagaagcacgagcctaagcacatgaccctcttcgttacccacggcattttcagcaaaggcctctctgtgttcgacgggatctacgatgctgtgtatgccgacactgtctggtgggagaacatcactgccgacggtattccattcaaaactgaaaatacaggacgtgtaaaatgagcatgcgccacttagatccaatccatgcaatcgacttctacaaatcagggcacatctatcaattccctgaaggtagcgagctggtgttctccaacggaactccacgctccaacaaactgttcaactctcacctgccgaagaacggcgtggtggtctggggtatccagggcttcatgacctggttccacgaactgtttgatgaagcgttcttccagcgcccaaaggccaaggtgctgaagaagtatgcccgtcgaatgaacaaagttctcggaccaggccgcgttgggacagagcatatcgaagccctgcacgacctcggctacctgcctatcgaagtccgtgcgctacccgaaggcaccatgtgcccgtatggtgttccggtatatgtgatgttcaacaccttgccggagttctactggctgaccaactatctggagacggtgttcagctctgagatctggaagccgatgacgaacgccaccatcgccctgcactacaaagcactgatggtgaaagccgctatcgctacaggcgtgtcgccggaccattggttcatcgactaccaaggccacgacttctccttccgtggtatgagcgggtggcatgacgcggcgtcttccggttctggccatctggtgttcttcaaaggcaccgacaccaaccctgccctggacttcgttgaagagtattatggcgcggatatcgatgaagactatgtcgttgctggctctgttgcagccaccgaacacgccgtgatgtgcatgggcacgaaggatggcgaattcgaaaccttccgccgcctggtacaggacgtgtatcctgatggcatcgtcagcatcgtgtctgatgcatgggattactggcaggtcatcgacgactatctgccgcgcctcaaagatatcatcatggcgcgtaatggcaaagttgtgatccgtcccgactctggtgacccagtgcatatcgttggtggttatcgcgtcgaagaattttgcaatgagcaggatttttacgataacgacccacgtgaagaaactgaagttatctatctcaaagaagaaaacagataccatattctggaacaatatcagtttaatcagatcggggaagagatttctcgttcagaagcggtcggttctatccagcgcctatgggagatctttggcggaacccagaccgaaacgggccacttcctgttggatgagcacatcggcctgatctacggtgactccattaccctgagccgtgaagatcagatctttgctcgtctggctgaacggaatttcgcttccatcaacgtagtgttcggtatcggttcctatacttaccagatgaacacccgtgatagtaccgggacggcggtgaaagccacagctggtaaggtcaacggtgaattccgtgagattttcaaagaaccgaagactgacaaaggtggtacgaagaaatctgcgcgtggtttccttaaagtcattaaagactctcagggtaaactagtgttggttgatggtatcacgtttgaccaggtgcaagacgcagataatcagcaccaactggtttaccgtgatggtaagttcttcaatactcagactctggaagatgcgcgcgttcgtgccgctcctctggtggaagaattggcatctcaaatatgttgaagaactgcaagccctgttgaaataacccgctgccctttggcgtgataatgaaccccgccttgtgcggggtttgttgtatgaggaacaattatgaagaacagaactggcattaaactcaatccagaaatccttaaatcccatatcgcagaagttatctatgaagaccgcgaagtgggagggcatcgtgttatcacttgccatttgaaaatggataacggatttgtcgtttggggaaaggatagctcaacatcgattgaccccaaaaatttcgatgaagaattgggcaagaaattggcatacgataagactttctctcaattgtgggaactggaagcataccgggctatggttgtccaagatttcattggtaagacaactgaagaaccgtttataaaacttgaagattatattgaagaaagtaagacaatgcaagtatccggttgggactatcggaatggtgtagccaccgcatattctattagatcaattaaaagaagtaaatttggattgttggattacatcagcatttgtctttacaaaactgataataaaaaacatgatgatatcaataattcgaaagaaatacagaaagcaaaggatttcatcagatcttatatgaatcacactgaaattaatagccagtttgtaattcatatcgcaaaactttgttgggctgctcggtcagcggttgtggacactacaccttcttgggaagattctaaagaaacagatcgccaagatatgtgcgaaacggttaaaaaattactgttatcccccagcgattatcaaccaaaagataatttgttgaaattgttttgggcgattgtgtcccagttccgataacaaaaccgggttcaatatacgttcgggcatataatatcctatcgttaaacagtggagaagatttatgtcagtcaaaatgaaaggtgccgagtttaaagcatactacgatgactcagagtattgggttcaggatgcttggcatgattatcacaacataaaggttaatggcgaatatattgaagatattgaaactgagaatattcccgacgacgctgatgtggttattgagtcggggatagtttatattcccatcagaagtgaatccggttatgaagaaaaagaagtccaactggtcactcacttcaagaactggcgcaaacagcagaaattttctactattgttgtggtagttgaaaaagacaaagctgaagaaattatagcctcaattaaaacaatacctggcgtcaataccgtcaagtgaggcgataatggattcctgtctattagatcccgagaacgttcttgtggttgaaattgaaaacaacaagccgttcattttgaaaatgttggagaaggataataatcctgaaaccaatcctaaactatcccaaaaggggaataacgatgattgaatcattagaatttaagaatgccacacagacggtcgctccttccaatcacgtcatcgtcgttgacatttcttattccatgtgctatgcgctgccgaaactacgccagcacctgaaagaaaacctgccctccctggttaagccggaagacaccatcagtattctgtacttctcttctcgtggcgacttcggtactgtgttcgccgggcgccaggtcaccaatgcatctgacctgagtgagctgggtaaactgatcgatcgcttcctgcaaccgacgggctgcaccgggtttgttgagccgctcaagctggctatcgaaaccgccaacgatctgaaaaagtccggcgtcatcaattccctggtgttcatgaccgacggctatgacaactgctggcgttccagtgaaatcctggccgttgccgagcagctgccaaaggcgtacgacaacatcaccctgatcgaatacggctggaactgcaaccgcgaactgctgcagaaaatggctgagtgctctggtgcaacccatgtattcgccgaaggccaggaagaatatcagaccgaactggaaacagcgatggtttctgtcgccccgcgcgttcgcgttgatttcagcgtcatctattcctatgccgtttatatcgaaaacgggattccgaccatcctggccgcccagtctgatgaagaccatcctatcaattacgtcaacatccctgagagcgtctctaagctgtgggttgttgatcctgatatgatcgaccaactggataacctggcggacgttgaagcggcatatgtgctggctctctttggcgtgcatactatggatgccgacctggtgtgggccgcgctgaaaaagactggcgatgtgcgcttcattaaacagtacaccaactgcttcaccaagcaggattattccaacatcaaaactgacatcacagcagcgattgtagacccggcgctgcgcggtgtggacggtatcgattacaatctggtgccgccggaagacgcaactactgttgttgatgttctgacttacctggcgggagcagacgcacaactggttgttgaccatcccctgttctcttacaagcggatcggtcgcggtacggtacaaaaagccgacgataccgaagacaagctggcggcagaaattgccgaagccaaatctaaagaagagcgtaaagcgctggccctgaaactggctgagcacgaagactggactcctgtgtttgagccggtgaaaggcgcgggcgttcctatcagcaatctggtttacaactcggcccgcccgaacatcagtctgcagactgtgcaaaacgggaccgtcatcatcccgaagtttgcacaaaagaaatacgatctgccggaatctattgacacatggcagtggaagaactacaccatcgtcaaagacggtatcatccatatgaagacccttcctgtggtctgctcggctgaaaccgtatctgaactggttagcaaaggcgttgaagtttacggcggcccggaagtgttcatcgtaaatctgggcagcgttccgctggttaaccgtgcgatggttaagaacatcagcgccgcgcagttctttgctgaccatgtccgtctggaatccctgaaagccaagcagaaggttctcaaatatttccgtgacgaactggttgggaaaggtaatgccgtgggtctggcgggcaaatacggtgccgaagcggctgagtttctgtctgcgaatggcatccgcgattacggcttctctccgaagaccgcttcggttgagtctactgatttctacatgagccgcgaactcaatgtgaagatcaaaggcgcttcctcgctgccgtcaattgccgccgttctgaagaaacaggcagacaacaaaaaactgaacgcagctgatcagctgatcgctaatgcgctggcagaatacaacgcctttgtcaaatctccggcggtgactgcagtcccggaagcaacgcagaccaagatcattgaatcttggatcagtgacgctgccaaggccgcaatcacccaagtgcgtgagctgaacaagaccctgtccaaatccctgtatgccatcgttgctggccatggctggttcaccgacctggatctggaagagtccaccatggaagtggaagttgacggcgtgaaatacaccgtcagcgcagtgctggaagagaaagagatcaaaatctaatcaactgtgccggggaaacccggccttttcataaggtataccaaatgtctaagaatgtgtcttatatcgatgtcatgcgcttccttgtccagtatgcaagcgacaatctgaatatggaattatggcgtgagaagaaacactccgtaacaatacaatccgcgattgaaaaaatcgaagaccagctggataccctggctcctctgcgcgtcaaagaacatctgggtggcgatgaacttgacgcgatagaaatcatcatggaactggaagaagaatatgatgtagagatcacggatcattggatcgggtctcaccaagacgacccaactctgggtgaattggctgaacacgtggttcacctattaaaataattttgaagttggctttacttcttcaataaatgatttaatattaattttgtagggcgggaacggctcccgcctgattgaagaaggtactatattatggctatatcacaaattgtcgacctcaccccgttttgcctcaacaatatttcaaatcctaaattagtcttgtacaaggacccaactaatttttgttggttagcaagctgcgacacccacaacggaaggcgtgctgtttgggatttccccgcgaccgatgaggggcgcatacttgctatacgcaaattggaatcagaaaattctaaacgcgggtgatagatatgtcgaataagaaagtcgaaaccacggttgaaattgaaaagaattggggtttcctgcgtgctaaaggtttccgccgtgtgtatgctgcgaaggaagtctatgtccagcgtaaggacgttatcattagcaagaagggtaagtcctgggtggcagaagaagtagacgaagacggcatcgtaggcaagattaaggccaaggccgaaatcctctttgctcttctgaagcaaattagctaaaatcaatatcgcggacggggtaaaattgccccgtcaatttgaagagactatatcatgaaaaaattaatcattgctttggctctggccagcctttccttcgctgcacaagccgatcgtgtcatcaagggtataaccactgatggcaaatactccttccaggcatttggttctgaccttgtcctttataatggtgcaaagcggctgtatcattgccgttacgacacgaccactcgtgggattgataaagcagaagatccatatgtgctggacatataccagtgtgggaataaaactctgggtgtcaaaaccttcgggaatatcgaagaaggcggttgggtaacggtaatcgcgaccgtcaacaataaacctgtcactgtattccaagagtcatttgccatattcaccggggcgaattcattatgatcaaagaaggggctgtaaaatgattattaattgggaattagtcggtttggtgctcagcattattttcggtgtggtgggtgtagtttgggtaatcattggcatctggttctatcgtttattcaccaaatatgagaaacgtgatgctgaacgcatgaaacgccaagaacaaatccgcaaccgccgggagaactggtggtgatggtcacaataattgggtatgggattattgggttagtcctattcttgatcattatctgtttcactaaacatatgcgctaactaagggataactccatatcccgaggtgtgccatgttcttgacttcctttatcgactggttgaatatcatcaacggcctgaggattcctgtgggaaacctcgggctttctcgttcttctatgccacaaattgacgctgataaacagcaagacttccatgattatctggaggcgaatggcgtgaccatagatgcatctcaagtcccgatccggacattacggctgactcagaacgagatcaacaaaatgaaggtctggaagatcatgaagcagatcaggaacaagaagccgatgggccgggtttgggtatcttcagacaattacgttgtggatggttcccatcggttcgttgccgctctgaatatggacggcaagcagcgtatgaaggtttacaaagtagatttgcctgccatggaatttgtaaaattagctcgacaattcaatggtgtgcgttatcgtactgtttctgatgcacgtttctgaataaagaatattattgaaatcctttactcaataaaccttccgaactactatttcctcaatgaacaagagggaatcaccatgaaacgtttaatccttggggtgctgctggctggactggcgctccccgccgctgccaaactgaactccacaggtgagaaactgtgggaagatctttcttactgtgctggatggtctcaggctgtcgccatagacaagactggttctatagagaacttttctgaattgtggaacaccgggaacgtgactgacgctgttgtcaacgccggaattgaatttaatcgatacaaacaaggagcctataatctcaaaggctacctgaatgacgataaattcaacaaaggtgggatggatgcttcagatttgatcatgactgggcgtatgggcacagcagggcggattcaggttagacaatgccgttcgctccccatcccggcgcttcagaaaggtgtcaacatcgggcgtcgccatcttgatctcattaatgatgggaaccagtgcgtcaaagtatttgaatacagtgccgatcagatcaatgatcctaaattgaagaaagaatggcgtactcgtgctctggaacttcgtgcttggctggtcgacaatgatcgttatcatcaagaccgggttgatgccgggctgaaagatttatcgaccaatttgtctgtgaatctggatgacccacgactgtcccgggaacttcagcagactcgtattgactgtgaaaatatgatgaaggagaacgaatgatgcgtgtgaaaaagtcgactatcataatcgtctacttggcattcgttgcagtctttgtggtctgggcaagcaatgcgttggcagtcccggcgaacaatctgaacaaatgcgctgcatggctgtcaacgtatcaacagttccatcctgacgataaagatacttctattttgctttccgattttgaaggtgaaatgaaacgtttggaccagtacagtactgaccagattgagaatgctctggatttaccaatgatggattccgcagcagataacagtcaccaaactgctgtaaacctgtcatattgccgtgagattgcgattaactttacccgtaatcaaaaataaaatcgggttaaaatttaggctctaattgaaaatgaccggagtactttaaatgaccgataacgaaattgcccagatcattaagcagcattcccgttttgctccggatgctgctaatgtcatcatgctacacaaagacggacgtgtattctttgctgaaaaatttgagcaagggtgccagttctgggatgcgagcacgatgcttccacgtaccctacaaggtatcatctactcctgttctctggtagcgaagcggagcgatgccggtcattgggttagtgttaatgatctcggtggcattatgggtgggaaagaatatccgaccaaacgctccccgccgccttatgtcaaagaacagatgtccaagattaccaatcgtccaagaccgaccccgaaagaaccgaaagtcgaagtcgttcctgcaacggcggtagaaacaaaaccagccaaaaaggatactgattggcgttctggatttatcggggttaaagaattggatcgcgaacgtaatcctcgcaaccatccattgttcgtgtcgatacggactgatggtaaaatcatcctgagcaaaggtcttctggataaaatcgatggtaattttgattttctggtgtctaaggatcggaaggtcattgccctggtgaaaaacggttctatgtataatatgaacaaatcggggaattactctcacaaaggtctgcccaagtatctcaagttcccagaagattccggtacagttcgaatctatatggactgggaccaagaaaagaacgcatttatcggcagtctataatatcggggcggttataatgaccgcctctttgatttgaaggaatatattatgcacaatgtaacaaaactctatccgatcattatcggggccgaccaagggcacctacatttatccgaaccctcatatatcgcctatgcccgtgtcgggggatcacgatatgtgtattgtgaacatgaccatgggcgtggtacaggcctcctccactacacggtgaacgacactacaatggtccctctgaacccggaagatgttgtgttggctcggcgagtttacatcgagttcaatcacatgcatgacaatgaaatagacgctcgctatcatgccatgcgttctatggaggggcgagattgtatttatcgtattgatcatttttctgaatttagccagtctatagattggttcatttctgacaagatcttgggtgaaaggatcatcacaactccttgggcgcatgccgaacaacttcgtgtttccacagacgcatacaaagaagttgataccctgtgcaacaaattccgcatttctgtaacctgcaaccaggacctgggtgaagagatccaatggaaagcgcagtccccacattttagtgatatggaaatgtgggctgaaacccgttcccgtgctgttgttcaattagttctgtgggcattctaccagcgcaccccgttctcttacatggggcagaaagcgattgatgaaattctaaaatcccatgcggtggatgttgaaaatctaatcggtaggagcgcattatgagcatgctatttgatgtctatctggtccattttgttgccagtcaatcccaacgttctttcttcgtgctgttgccagcagataaaggtatgggtattgatgacatatccactttagaaaatcaattctacgaacattgtcatgaccttgggtatctggttaatttcaataaattgacggacgagatcgctgcgcaagaaagtgacggtcttcgacttctttcacggtctgaattacaactaatcaggagtaaacatgagcagccgtatttttgatctaaaatttcgcgtttggcacgttcctcaggtgccggggaaaatgtttacagttgaagtcccgacgtatgctgaagctgaacgtttgaaatcgtcgctggctgattatgatctgttccagtatcagaacaacatcaaacccgattattgcaacgccagcggtattcagatttatcaacacgacctaaatgatgccgagttgatcgaaatgggccttgaagatcgttgggtggatatcgaggatgaccaagatctgcaggattatctggatcacctccgttctactggttgggaaataaaatcatgaccatgatcagttcttatatcgttcaaaaaggtgatacccttatggggatctgtatgaaattttattcggatccctatatgtattcagatatagcgaagtacaacaatattattgacccaaacaaaatttgcgttggccagctgattaaattcccccggcctgtcaatgacccacaaacagtcgttatcccggtagaacccactcagaaatgtttggatgctatcgcaggcttattccaggaaggattttgtgatggtcgtatagaaagagatatttatgccgtcatagtgagttcggctctgaaccaataatttattgggaatcggcaaataagtgctttattcaataatttttgttaggtaagctgtaatcctcttgtagtgaacacagaagtaaacatttaacataaaccaactggagtaatccgaatgaatcgtcaagattttatcgcacatatcgcccaaactcagggtgtgaccaaaaccgaagctgaaaaaactgtcgcgtcctttatcgctggtatcaactctgccgtcgctgctggccaatccgttcaactcgtcggattcggcaccttcgaagtgaaacatcaggaagcccgcgctggccgcaacccgctgaccggggctgcgctgaccatcgaagcgaaaaatgtcgtcaaattcaaggtcggcgaaactctgaaaaacgtcgccaacggcaaataaaacaaattcggccagtaccaggcgcactgcgcaggcaggtacaaagaggaagccggggtaatccccggctttttcgttcttgggattcgggtaaactatactgacacccccaaaggagaaatcaagtgacagcatttaaccagcatgccagagcgctggagactcttcgcagagaaataccgatagaagaaatccagaaattggccgaacgatattttccatatgaccacgccaaccccggccaaatggaatgtattgttgaagccatagatgctttggtcaataagaaattcaaacacgtgattatcgaagctcctaccggagtcggtaaatccctcatcggcacaactatccatcaggtgttgcgccaccttgtgcttgaagcaaacccctatggccaattccgtacatccatttccacgccgaccaaaggtctacaagatcagtatgcggctgaaaaagctgttgctatcgatatcctgaaaggcaagaagaattatcgctgccatatgcatccggatatctattacaacgcagtgcaatgccgtatcgcttgccgggatgggcattgtagtaagaggcgttgcccctatgtccaggcacgtaatctctggaccaacatctcttcattacgctgcacaaacgcagccatgatgatagaaatgtgcaccaccatttgtatgaagccagaaaaccgggccgacatgcttattttggatgagtgccataaaatgccctctacactcctagaccatacgatcatggaatacaatacgaaggtattggaaggactgagatcgttgcctcaggggaaggatatcgtccaggcagtggttgagattgtatcccattgcaaagactatgaattgggcaagctgtattcccttgatggttatctgttcgaccgttttgtggacttgttaggaaaggtggaagctattttaacagaactgcatgaactcgttgaagatgaccgcctgaccgaagcccaggtaatgaagctggctgatattatcgacaccctccacaacctatctgactattgtggtatcatgtcacagacccaggcgagtacatttattgtacaagagaaaggagaagaattcatccgattcaaacccgttatagcatcggatgtgtctgaattcggccttttccgcaaagccgattatcacgtacatatgtctgcaaccatctgtggaattgatgcgtatgctcgctccttgggtattcgtcctgggcagtaccataagatacagatagggaacccgatcccgattgagaatcgcaaagtcaattacatgccggttatgaaaatgaccaacaacatgggtgactatgagatgcgtcagctggccgggtttgttgacgagatcatacaattccatcaaggccagtctggcatcattcatacggtgagttatgaccgggcgctggcgatacagaagttcagcaaataccggaacatcatccacgtgcccaggacccgcaaggctctgatggaactgatggataatgctttccgtacgaagacgccgtgcatcatcgccagtccggctatggaagaaggatatgacttcaagggggattatagtcgtttccagattcttatcaaggtgccatatgattaccttggtgacccattagttgcgcatatcaactctgtggatccatcggcgtatttccggaatgccatactgcgtattatccagatgtgcgggcgttcggtcaggggcgtgaacgactgggccgcgacatacatcctggattcttcctttgaatccttgatgatgcgcaacccagagttctttccaacttggtttaccgaggcagtatttgaagtttaataaccagcaataaatgacaggcgacatttgagattcggtgccagggatgtcagggatatgatcatatcatcgctgtccatactgtactcaattgtcgccagttgctgggtttgaacattgttgtattcactatagatcaggtcctcaccacggaaaccgatttttccatctgtatcttgccaatgaccttgtgtcttgtcgtacacatgaacacggaattctaccatatggaaaagcgctttcggtatacttttcaatatactggtgccgacgactgggatctcaatatttgaatcattggccccgccttcataaactggcgtccaattgaatataggatcaccaccagcgaccggagtccttttccaatattggaattccgggttccctgaatcgtttttctgcaacaatatgacttcgccacctgtaaaattggtggtgtcaatatcgtctcttgctaaaatatccgccggggagccgataaatttccagccatcacgatccaataatgacttataatagtctgtgaaaacgttgctgtcgccagcattgttgattgcgtctttgagaccttctcctgttaccatctcattgactttcaaccacatgtttttgaccgcagacgctgccgcaacctggcctggtgtaccgcctgcagtgtagtcatagatgatgtctacattctgtattgcggtctgtatggacaggagaagtcgttcgatttcagctgcggttaaactgaaacgataagaacgttcagccataataatgtcctcatgataaacaagtttggagtatttatatcgtgattgaaatttacactgacggcgcttcatcgccacagaccacacaagcggcgggatgggcctttgcagtcagcccgatttctggcggggtacaatggaatgtattctatggttatttgccaccgccttctacgaataatatagcagaactcttgggcgttattaatgctctgaaactcctttggaaattttctggttgtggtgagcgtaatattcccaaagcgacgattatatctgacagccagtatgtcatcaatagtgccaccaaatggcgttcgaaatgggaatatgagggcatgcctccgaagaatactgaattgcttcttgatttgttcaatatgtatgacaaagtttgttcaatttgtgaacttgaactaaaatgggtcaaaggccatgcgggtacaatcggcaacgaaattgcggatcagtggagtgtccgggccaaagaaaatagcagtatggtcctggaaaatgaacgatttcgcgtcaagaaagtcgtcggttcattcaatcaatttatcggtatctctgagggttagatcatgggcatgaatttcgtagacagaggggaaaacgtcaccaaatatttcactgacgaagacaatgagcgtgtcatcgcaatattacgtgactggatacccggaaggaaaaaggcgatagccgaagggaagcccctacccaagatcccaaattatgtggccactaaagtccatatgatcatccagaaaatgagtacccgctacaactacagagattatcctttccgtgaagatatggtgagcgatgccgtcgccaatattcttcgatatttacacaccttcgacgtcagccatgtcggcaagaaagggaagatcaatttcttctcttgggtcaccatgtgcgctgatcgttcattcgcccgcaaattgaccatcgaagaagaacacacatatatcaaattgcgttcattcgaagacgcgggtggctttgcggcgttcagtgatgatccagacttccagactcagacatttgttgacaacaccgggattacaatggattttcgtgagcggataggccacttcgaaaataagaaagaatcccagcgtgaaaaggaaagacaaaaacaagccgacctcaaagaagacgaaaagaataaaaagattccaaaaggtatacttcaatgtctccgtggaccgcaaaataatgctaccgcacaggccgaagatgattcagaacaagacttcggcaaaacccaattcagccttgaagaaataatggatagccctacgctgctatccgaattatcaggagaaaagaataatggcgattgctaagatcggcgatttacacatcgggagccgcaatggctctcgttatgttcgtgacttcattaagaattatctcatcaactatttcattcctgaactcgttgatgccgacatcaaagaagtctggcaattcggcgacacatttgacgtccggaaattcatgtatggccgcgacaaagattggctaaaagatgagttggtcccggcgctgcgtgctgctggtatcaagtggaacggtcttgtcggcaaccatgacatcactctggaagaatctaaccgcatcaactggccttcttaccttgtcgatatggccccggatgtgttcacatattactccgaaccgacggaagttatggtcgagggcaaaaaagttctggtgctcccgtggatcaacaaagagaattatgcgcggtcagtacagatgttgcaagacactgatgcagagttctgctttgcacacctggaactggctggtttcaaaatgtatcagtcctccacttgtgaccatggccagatcgatttgtctctgttgagtaaattcactcgtgtagacacaggacacttccacacccgttcgtttgaagggaatgttcagtacctgggaacgccgtatcatctgacatgggaagaccacaaagacggggataaccgtggattctacgtggacgacctgacagaaggtggtgagctgttcatccccaacaacgccagccaaactctattccggtatgtggaatatgattacaccaaactgtcatctgatgacgaaggtaattggattgatccggaatggctaaacaccaagttgggtattgaaggacagatcgttaagattatcgtaaccaatcgcgataattctaagcattacgagaagttctgtgatgcgatgaagcgctgtaaatgtattgactacaacttcatcgataagaccgtgactgtttcggctgaaaaggttgaagtcaccgaagaaatgatcgcgaccgatgccgtggaagttctgaagaatgatatccgcgctgctgacaatatccagcgcccagaatcggtctgtaaactggccgaagcattctatacagccgcccaacaacgtcttaatactctggatgcataacgatgacagatatccttgaaaaatttggcaacctgttaaaagaagctgcgacgccggaagatatcccggttccatttgatgtgcgtggtgatgttacccacaaactcaccttccgtaaggggcgggcgaagaacttccgttctattggtaatgaattcatggaaattgattaccaacgaaacccagcaaccctcgttacatctgatgataatggcgcggggaaatccactatgctggtctggctgttattctttgtcctgtacaacgatacatacagcaagaaagagaagaaggccggactggtaaactctcagaacaaaaaagactgtgtgggagaagtggaattcgcctgccggggtagtgaatggaaggtccgccgtgggatcaaacccgacttcgttgaagttcatcagctggttgacggggaatggaaacaggttgtaaacgaagcggctaaagccgacatgaacaagtatatcgtcaacctgataggcatcgaccagaagatgtttgagaactccctggttctgggcaaagagaaattcatcccgttcacggaaatgtatacggctgaccgccgtaccatggtggaagcgatatgggatctcggcttcttcagcctgatgaacgaagacgtcaaggcaaagatcaaagtgctcaacaaaacgttggaagatatctccaatgagtttggtatgaaaatgatcgaccataccaacaaaaagacgcagctggcacagatcattgaatccaataaccgcatccaacaacagtctgccgaaatcctggagcaggaacggatccggctttccagtctggatgcggatatttcttcttaccaagatgaaatggcccggttacaggaagtcgaagtcaacaccaaaaaggaaattggtgaagtagaaagtcgtctcaatcaagaatctactgaagagatagaaaacctaaaggcacaatatgccgagaagatgaaagcagtagatgacattgcatcagataaagctgaggactatgagcgtatagaattgtcttcggctgagcaggcgcttaacgatatccgagaccaagcccgtaaggtcactgaacgcaaaaacgaagtactcaaccagcgcaatgagaatctgaatgttctcaacgaagcgatggaaaggctgcgttatggcgaaggtttcaggatcaaattccaaaccgaaaaagaagggtatcaggaatccattcagaagttccatgatatgggtacttgcccaacttgccaacaagaagtatctgaagaagctaaatcccaggtccaatacgaaggcaacatcaaaattaaagatgtagattcccgtattgaacgactggaaactatgctggaagaaatcaataccaccatagcagagcacaaagcgaaggatgatgaatttgttcgccaagtcgctgaaatcgatgctgagttaagttctctgcgagaccaagcggcagaagcgcataatggtattgaaacgattaaacgggatattcaagagttctacaaaactgctgaaattgagaaggcttctcttgaccgtgaactcaaatctcaaatcctgtctaaccgtcaggcgctgaacaccaggttcgatgacattacggcatcattacaacaaacgttagagacagcctctcaggggcgcgcaactgtcaaggataagatcggcgagctgaaagcccgtcgtgcccctctcgttgcttcgattgccgatttggagcgtaaactatccgtacagccgactccaactgccgacctggaagcagtcattacaggtattgaacaatctctgaaagatctggaagaacgacgccaaacgacagatgaagaacttcaggatcataatcatcttctccacttcttgaaggatgaccagaccaaggcccgcattatctccttgtacctgccattcttgaataagaagatcaatgaatatctggaagggatgaatatgttcttggacatttctgtggacgatacgtttgatatcaccatgggaaccgccgggcgtaaagggcaaagtctcttcagcttatcttccggtcagcgcgtccgtgttaacattgccatcaccatggctctgcgtgacgtcgctaacctgaaagcatctgtccaatgtaacatactggtgtttgacgaagtgctggagaacctttctgagcgcggtgtacaagaatgcattgagatgctgaaatacaaattcagcaataataatctcttcgtcatcagccaacgtgagcaggaattccaggaatacttttctcataacattcgttatggtctgcgaaatggtatgacccaggtgatcagcaaagagtgatcatgaaagtcgtccatttcaagaaggaaccatatgacatctacatcgggagacccggaaaatgggggaacccgtttgaggtcaaagatcatgggcgcggtaattgcatcgaattatttgaagatgatctttaccgacgcttgataaatggagatatcacggaagatgaactccttgaattggacggaaaggtcttagggtgttggtgtaagccgcgcccttgccacggcgatgtttatgtcaaagtggtcaaccgtattaaactattccgattgatgggtaaatcctttgtagagcacttgagacaaacttatgaaaaaggttcttgtaaaacttgattgccaaccatattttcctgatgtttggtttaccaatagccgtgttctcttctcacaacaagtatccaaaataagagaagagggtattccccaagattttggtgataccattgggatggttagctctaatgagagcaggagcaaaatggtcatcggtctattcatttccgattctggggtacttgtacatgaattaagccatgctgtgatcaatatatttgaagctatcaacatggtggcaaatactcatacgacggaggcatttgcatatctgttggaaagtttatacaaccaatgcaataatcatttgaactcctggagtatttcagatgggaaagaataaagacgaaatattcgaggcatcaaagattgcatgtgacacctggaatagcaataacccgaagtttcctgtggccattggtgttatttcataccatcttgaaggatacgtgatatttgttgacgggaaaatcaacttttaccgtgatgggcatgaattcaacggattattcaagatcgggaattacaaaacttcatttgatgaccctatggaactggtgtatgcctggttagaatgcatcgaagaatgctataacgccaaatttgaataatgataaagggcgctaattatctggtgccctttatcttttaaccctgtcaggaggctcaatcgagctgcaagtcgacaaacaaataaggaacgccatcatgacgatgacaacgttgaaggccatggctgctttcgtgacctttaccattgccagcgggagtgtgcacgcttcccaaagtacatcacaatgtgactatgatttttctgagcaacaactatccaccatggcgactgcataccacgtaggcaagtcccaatctcttggttacaccctggcagctatatcctggagagagtcccgtgcgggagaagacgtcgtgtctatgcgatctggtatcaaagccgccaatatgggagcatttcaaaacaaagttcaaagtgttggggatcgggaaggatgcaagaacagaaagtgctatgccaatgtagctgtgaaacttttgattgatcaggagtatgctgccaacgccgcgctggatgagatgaatttctggatgaaccaacataatcagaatgtacgcaagtctctttcatcgtataatgccgggcacgcacgcaacagcaaatcgaattcgtatgctgccgatgtagtgaagaaggctaaatatctgcaaagatgtgtgtctttcaaaggcattcccgcgagttcgaaagttgatcctcaggtgatagccatgaacaagcgcactatagagaaactcaagaggacgcgataatgaatatcaccccatctcaaataggttatgagcacctgatggtcttcctggctattcagggagccaaagagggcatcataacttcagaatacagcgggaccgtccgcttgatcgactacacggccagcgaagcatttatcaagaaatgtatcacggcatggaccaaatatgctgttgggacttacccggcccctcctgctggagaactgttatttgtcgtgcctaccctggcgacaaccgatactgacgagatctttgccgatatgctgtccaaaggatatctggcttatgacacacagcatgatatctatgacttctcagcattgaatcgggtgttcggttatacgatcacttctgaagcgaatatccctgattgggggatcctggcttggggtaaagatggccttggggcaacatatgcttcatctgatgttggaccagttcttattgatcctgacgttaccatggagcagtaccttgcgcaattccctcagcatggcgtaacgggtagcgacatcattatcgtataccctggttctaacgcccttgagcgtcttgtgtccggatgggatccacatctgaaagcggtcgtagatggtatccgcttctacatcccggtagtaaatcccacagcataaaataattcaataaaaaggggcttcggcccctttacttattcaataactacccctataattcaatacataagcagtacgatgaaacaaattgaaacgaaggaactacattatgaaaattatcctcgacgcatatatccactacggcaagaaatatctgatggcgaaggtgtacgaaggcgaaaccctggtacacgcccagacccacgaagatgcaaaactccgcgaaattctggcacgtgacttccccggcgttgaagttattgagccgaccaaccaggctgaagttgacaaagagtgggaacgcgaatggagtccggctgcgttggccatcgctgaaaagaactggaacaaccgtgaaaacgccaaccgtccgtttcgccgttgacacaatagggactataatgcccctttcctttcgctaattaatggaaaccgtccgttttattatcaggagaaccaccatgtctataccgaacttcttagatttcatgaaagagcgcgaccagttggacgaagcgttcaactcagctccttatgaactcaccatgggcaagaaaaatgctggggacgttttcttcaccttcatcgatgaagatgataaagaataccgtatccaattctataccccgcaaggtctgggtaaaaacgtccgccaggtcttcatcggacagaaacgtggttcagtttatcctgatgccatcgcccgtttcaagaacccgatgcgcgttatcgccagcatgatcgaagccaccaaacaattcatggcgacgcctctgggtaagactatcgatggctatgccgtcaacttctctaagaaagcgctggatcgtggtatgaccctgatcccgaaaatcattcgtcaatccggcctcaaacaaaaactgaacgtcatggatctgacctacgcgcctgtccctgaccgtggttatgtttggctggtcaaaaaaggaaaagacccggctcaggtattcgacggtccgaagatgcagggtatcacctgggatgatccagacaaggtcggtgacgtcccggttcagaacaatactccagatgtgggggcttcatcttctgttgatgattccaacggatggaaattaacttcaaacggggatcagcccatgttgatatgggttggtaaggagagaggccgcatgaacacggcaaatatcgctccccactacaatgagccaggcgtgtatgttggcgcatacatgaatgagaaatctgtgcgtgggcaaagtgctgatttcattgctcgtcagttgaaattaccgcaagtccctatcagtatcctgaatgattttaccaaggcgtccacaaaattctggaaaggttctcaacagaagtctgcgcctgttgactctaataccatgatcggcgcaaccagtatcgatcaattgcgtgacagcggtttcatcgcccgtgtgttgggtatcattgataccaatattgatcagaaagcaagctacctcccaggagaaagcattaagaggatcgggcaggcgcgttatcaaaccaaaggcggtctagtgatcattgtcagcttcgattcagtggacggtaagaacctcacctacaatgtgttctctgaaatcgaatctcagccgggtgttatctcgggtgattcgcgtcgcgtcgcgaatgaaatcatggaaacgatcacatacgtcgcagaacaccagtatcgtggcgaatgggaaatcaacgcagtgccgatgagcgctccataccctatcaaagccgttcgccgttctcagggctggggttatgtggagaccgcgaactggactctgaaagtagccgatgctatcctgaatcgcgtgaaaccagggaataccgctctgttggaactcaacaaagagcctctgcgcggtaagcacctgctggaaatcattccagagaagggcgacaagactctgatgttaaaagaccgcagcggagccatctacggttccattgatctgaatgctcagagtggtgatctggtaaactccggaactctgaatataccacgcaacgccacggtgtttggtgagactgtcaacggtatgtccataacttggtccggcatcaatttcccggaaactgggaaatatggtggcgctgtattgacaactaatgtgacctactactatgataaagacaaagtcgcattcacgccgatgatctcccagaaagggcggatactgaacaatccgaagacatatgaacttcctttgaagaaaactattgttcaagccgtgatcgatgaaatttcttcgaaaatggaaattttatctcggaatatgcaaactctgaaaagcaagtcctataatccgaaacaagtatttttggacgacattgttgtcgacgacaacggttcagtcctttggcgcgggcacgacatggctgatcgccgcactactgaattcatgttgggtattttgaatgacgaaaatagtcgtctggagaaggagggcggcaaagggaagacagctgcagacctggcaacatatgcggcatcgattgaagaaagtgctccaaaggggcgtgaccttgattggcgggtatacttaaccaacaatggcaattccttgcaggttgattgggaaattactttccgccgcaacacacgtgtcggcgccatgaaggaattcagcgctcaggtctaccgtggcaaccgctatctggaagacgtatatgccgatgctaagagcagaggctatgcgccggaacaaccgaacctgatggcgatgtccgatgctcaacgtagcgatgacatggctatgatgaatggcgaagacgcgtattccgaatacgagcagtcaatcggcggcagtctgaaaattaatctgaagtaaaatgattagcccctgcgggggctaattatgaataaattcttaggagataaacccatgaagacctttctcgaattctttaccgaacaagcagcgcagcctgtgacccatgctggtgtacagggcaaaagtgttaccatcaaaaagcaagctgacggcactcagtggtgctctggtactgttacccagatcactccggacaatgcagctgacacctataacctggagctgaccgatggtaataccgtcaaagcagtgctgaccccggaccaggtacacgcggtgtctcagggacaggaagtcgtagccgttcatgacggtttcgaattcttctttggtaaatctgctgacaaaggccaggtcactgaagcatatgctcaggaactcgccaatatggacaaaatgatcggtaaggcgctgggcgtcggtaaatctcgcaagagcgggcgtaccgaatttgaatattcgggcatccccggtatcggcaaatctgttgctatcgacttcggtggcgaagacgacccgtatgtgatcgtcaccatgggcggaaagcaacaggacatcagcaaaggtaaaacgctggctgtcgacatcgccaagtacctgggtgtcaagcctcagtaaatctccggttagtaaacaatcccccttaaatacagggggatttctttttctgaggatgtttaaaatggtcaatgcgagcgcatttatcaaccgtggtctgttggcgatagcacatactcatgcacttcacttcaccacgcactcatattccaaacataaggcactcggggagttctatggcgaccttgaggacttgctggataccttcaccgaagcatatattggcgcgggcgggacttatactcccggattcgagaacacgaagttattcaacccagacccgatccaatatatccagagcatcgttatcgacgtcgacgccatttatcggcagtgtgattctcatctccaaaatacgttagacgagatcaagaccctttgctatcagacgctgtataaactgaagcaactggcgtagtctatagactcctctgataatataattgcccattatttgtcaaccatggataaagataaagatgggcaaaatcttcgttccaactcatttagaaggctgtcagatttcagccaaatatcttcacaagcagatgaattgcggtgccgtatttgtcgaaccgaatcctcataccaattctgaatcccctgatgcaatcggtttccgccccgatgggtgcagtattttgatcgaggtcaaagtcagccgggatgatttccgagcagatgccaagaagcctcatcgcatcaatcccgagcagggaatgggcagctatcggttttatgcatgtcctgagggagtcatccggatcgaagatctaccaccgaagtgggggttgttctatttcacgcctcgaaaatcattgaaggctatccatgtccccgacatgcagatatcttccctgtattctccccagcactatctgaatatgatagcccgccgaagcccgaatggtaagatgcctccttatctcctccattaccaaaagatggtggaagacttcggccatgtcgtaaagaacaccgtcgctgaacacaatatcctctatggtgcttggcgccagctctgtattgctcaaacccgtggtgtggcgtatactgtcaatgaggtattccagaggccaaacatatgaactataaaaggatacacgactccataatttccagggcggttaatcggtcactgccttcgggttacacagagaaacatcatatcattcctctttccatgggtggtaaagataggaaatttaatatggtggttttgacagcgtcagaacattatattgtgcatatgttgttggctaagatgtttggtgaagttatgaacaaagcatttaccaaaatgaaacatcttacatccaatccatccaataacaaggagttttcattaagaagggaaatgttatgcactatttctggaaacaacgctaaaactgaaagaaacagaaaggctcattctgataaaataaaaggccgaaaacatacagaaattacgaagaaatctatttcggattctatgaaaggggttaataacccaatgaaggggaccagtccttggagaaatccgactaatataaaacggggttctcataaaaattggttgatagcggataaaatatacaacaaatggtgtaataacaaatctgttagagtcatagatttactcaatggaaacgatatgcagacttcgtatacgacagttacaactatgaaattgaaattcgaagctggctgggttcctaaagaagacgaagattggattgtctttgtcaaggagaacaaacgtgaaatttcttgatgaacaatttatcaattatcttgccccgagattggaaaaatttgtctgggaaagaactggttccgttgcgaaatttcgttgtcccttatgtggtgattctcaaaaacacgccagcaaacgtcgaggacatttcttctatgatcatgatgaagatgtgtttagatttaaatgtttcaattgcaatgagatgagcggttgggcttttgagttctggttgaagaaattcgatgaccgtctgtacagcgagtacagcatggagaagtttaaggtcatgggggatacccgcgcccgcccggtgcaaaagctggcacccttgaagaaactgacacagacggcgcgtatcggtcaacaagtggcgaagcgggatgaggaccacctcggcaatatgatccgactagatcttcttgacccaacacattttgctcgccaatatgtggaaggcaggggaatgccggagagcgctctctctttgttatatttcagtgagaacttccggaaggatcttctcaatttcgagactgacccagagaagcagaagaagatccctgatgatcccagactggttatccccttctggactcaggatggtagaatgaagattgtccaagggcgcgcatttggtgataacctcccagaagggatgttgcggtatgcaactgtcaaaccgcgcaatgaagacacgaaggtctatggagaagaacgcattttgatgaaccgggtgaaattagtagttgaagggccgctggatagtctcttcttaccaaattgcctggcgaccgcagatgccgatctattgagcgccaagggggacatctatgtgcctgacaaccaatatagaaacccgcaggtctgtgatggcatacagaagatgatcgacaagggtgtcaagatcgttttgttcccgcgagagatacgctggaaggatatcaacgatatggtgaacccgagcaaagggaatatccctatccgtgatcttctgaaaattatggccgacaatgtctaccagggacttgcggcttccttacgatttgccgatttgaggaaagtgtgatggatatgaaagaacttgataaactggatgaccaggagatcctccggggataccagcaagcccgagccggatatgttctcagtggttatgaatcaccgagtttcgtacatggttggcgtaatggggtagttgattctggggcgtgtcagcctgatgctgatcagatggatacggcaagaaactatctgaagcaactacgcgaacaaaaataattcttccctccaggcctctatctacgaggcctcgtaaaataattcaaaaatattttaaaattttattgaaaaagactttactcttcaataaagctggcctattatagttcacatagggcggtaaacaacaccccgccgaatgaaaagtgaaaagcaccaactacataatgaggatttaacatgaaaactatcaaaaccatcatcaccaacggctctgtatctttcgaactgaacaccgaagtttccaaagcagaaatgttccgcattgcacaggaagccggtttccagggcggtaagacctccttcatgaacctgctgagcggcaaaactgaaactgcttgcggcttcaccatgaaagaccagattgtggttgaccaggcggtagtggctaaatcctctgacaaagtcagcatgctgaaaatgttcggcctgaacatccacatcgtggaagcgaagaccgaaacctacggcactctgaacgtcggcaaaggccgggtgcagctgaacccgctgaacaacggaacctactcggtgatggtattcccgaaaaaaggttacgacaacacagatatcctgaaagcggtcggtggtgattctaaatctcagtatgtcaaaatgggcaaactgactctgatcgaagtgcagaacatgatcgagcgcctggcataagtcgccaagggggaggaaactcccccatcctggaaagatgaggaataaatcgatgaataaattcagcagcacagaagcgactaagattgcggaagaaaccgcacaattactggcttcacatactttaaaaaattggcagatagatacatgttccttctcccaaattgtcctttcttgtggggatgtgtatgttcagcatctactccccacgagatcttggcttgctggttttagagaatatgacgacaatattaccagcgattatgttgattctgcaataatggcatacgaaggtttaaaggctgctgttgcagagtccattgacgagttgaaagaaatttacgacaatatgtaacgaaatttcctcgagtgtaattcactttcacttaaatacctctgcaaacattgcggaggtattttcttatggccattttaaagattggcagcaaaggtctggaagttaagaatcttcagaccagtctcaacaaaatcgggttcaatctggttgccgatggcatatttggtaaagcgactgacaacgccgtcagggcagttcaggcgggtgccggactggtcgttgatggtattgctggccccaagaccatgtatgctatacgcaacgcaggggagtctcatcaggatcatctgactgaggctgacttgattgacgctgctcgtgaattgtctgttgaccttgctagcatcaaggcagtcaaccaagtagaatcgcgcggtactggcttcaccaagtctggaaagattaagacattgtttgaacgccacatcatgtacaaaaagctgaatgccaagttcggtcaggcaaaagccaatgctctggcccagctttacccgacgttggttaacgccaaagccgggggatacacaggtggagacgcggagttggaacgactccatggtgcaatagcgatcgataaagattgcgcctacgagagcgcttcctacgggttattccagatcatggggttcaactgcgttatttgcggatatgccaatgccgaggagatgttcaacgactttctcactggtgaacgtgctcagctcatggcatttgtcaagttcatcaaggctgacgccaatctgtggaaagcattgaaggacaagaattggactgagtttgctcggcgttacaatggcccggcgtatgcacagaaccagtacgacaccaagctggctgcagcatacaaatcattcagttagtcgaaggccggaaacggcctttttctttatgtatgatagagttatgctgggcgcgtcgcttaattaaaggtgatgagataacccctgtagaaataggaaggttcacatgcaatctgcgagcaaagtagtatccatgaagccagctggtaagaccaaatcagcgcgcaagaaagaagtaacccagcgcgaagacgaatggatgaagttctctaaaggtgatttcaaaatcgctccattccatggcctctctgacaaccagaatctcgcctaccaatctgcccttgaaaacaatctgaccatcacaatcggacctgctggtacgggcaaatcttattgcggtgctgccgctgctatcaaacatcttattgatcgccgtgtcagtaaaatcatcatctctcgttcgccgttgccaaccggacagactgcggggttccgccccggcgacacgtatgaaaaactcgtcccgtatctgcgcccgctgatcgaaaccttcaagaaagtgttgaagaccgatactggcagcgacggcttcttcaactatctgtgggagaagcacatcatcgaaattcaggatctggagactatcaagggtatgacctttgatgatgccttcctgattatcgaagaggctcaagaatgcgacatggagcagctgaagaacctcctcacccgatcttctgactcgacatacgttttcgtcaacggtgacattaagcaatcgaacaaacgcctgcgtgatagcgcccttgacacgtatgtcaaagtattccgtgatttcaaccagaaactggaagcgggtactctggctgttcacggtgtagagccgggtgatgcatatcctgattgggttcaacctttcagcatcatcgagttcaacaaaaatgatcgcaacggtcgcggcaatttcactcgtctgatgctcgaggtcaatgacctgtacgacatttaaatacctcatcaccattccccgccgccttcaatctgcgagggcggcgtataataacaacctgcatataacacaaaccgaggatctctatgattaacgtcattaagagggacggatcttctgtctcctttgatattgaaaaacttcacaccgtcgttgaccgggcttgtgatgggctggacggggtttcaatgtcagaggtgattgcagcatcaaagatccaattcaccgataatatgagaaccgaccgcatccaggatattcttatccaggcggctgcgtctctcatctctgtagaaaagccgaactatcagtatgtcgcagcgcgtctgaagtcatacgatctccgcaaaatcgcctatggtcagtacaagccgccccatctgctggatatctttgtcaagaacatcaaactcggtaaatacgaccgggaattcctggatctgtacaccactgaagagtttgatgaacttcaggccaccatcaaccacaaacgcgataagaacttcacctgggcggccatgggccagctgactgagaagtacctgttgcgtgaccgttctcaaaaagacaagaaagtctattgtgaaactcctcaggtcatgtatatggcgattgctatggcgctgttctctaattgggacaaggccagccgcctggatatgatcaaaaagttctacaattatgccagcacaggcaaattcagtcttccgactcccatcatggcaggcgttcgtactcctacccgtcagttcagttcatgcgttctgatcaaaactggcgacacgctggattccatcaacgcgacagccaaatctatcgtagactatgtgagcaagcgtgctggcatcggtttcgacgttggtgcaattcgcggtatcggcagtcctatccggggcggggagatggtccacactggtctggtgccattcatcaaatacctgaccggggcactgaagtcgtgctctcaaggcggtattcgcggtggtgctgctacagcttatatcccgctgtggcattaccagttcgacgatgtcgttgtgttgaagaacaaccgtggtacggaagaaaaccgcgagcgccgtattgactatggtattcagatcaaccgcgtcatgtttgaacgtctggtcaacaaacaacctctgtatttgttcgatccgaaagacaacatggatatgtacgaggcatatttcagcgacgtggatcaattccgtactctgtacgacaacatgatcaaagcagcagacgccgggttatgtcgagccaagacactccaggctgaagaagtattccagacgttgctggatcagcgttccgataccgggcgcatttacatcgcattcgttgatcacatgaacatgtatagcccgttcaacctcgacacgatttacagctcgaatttatgtctggaaatcgcgctgccgactcgtgaattccaacaatacgatgatgaaagtggtcgtatcgctctgtgtactctggcatcattcaacctgacggcgtttgatgatccgacggaaatggaagatgtggcattcgtattagtgtccgcgctggacatgctcctcgaataccaagattacccggcccgccaagcccgcctggctgttcaggaatatcgtcccctgggtatcggtgttgtcaacgtcgctcacttcctggcgcggaacttcaccggatatggttcgcccgccgggttacagctaattgatgaatggatggcacatcttcactattatctggtcaaggcatccaacaagctggcggaaatgtttggcccgtgtggtaaagaaacaatccattcaagcggtatggtaacagctgacctggcccctctgccactggacctccttcctaatggcaaaaagcctgttggggacgcatacggtctggattgggatgggttaaaaaataggctcgccaaatttggtatccgcaatgctaccctgttggcgatagcccctactgaaagctcctcgcaggtgctgaatgctaccaatgggattgagccaccgaaaggcttggtgagcattaaggcaagcaaggacggcatctacaagcaaatcgtgccggatgtcgaaacccttgagcctatctatgatctcaagtggaacatggaatgtatcgactatctgaagacggcggcggtgttccagcgctgggttgaccaatctatcagtaccaataccttctatgatcccgagaagttcccgggaggaaagatcccccgcgccaagatgatgcaggatatcttatccttctatatgtggggtggcaagactctgtactacaacacaaacaaagactccaaggaagatgaagagttgaaagcagcagaagaccccggctgcgattcgtgcatcgtgtaagttaggtctatatctcactgtgttatattatcaggggtggagcaattcaccccattatccatcaggaaagaattatgtctgaacaaaagcaattttccgttttcgacccgacatcgaataaccagggactcccgttctttggtgatccggtatcaatccagcgttatgacgttgttgcttggccgtttgtacagaagtggtatgaaaaaggcctcagccaattttggcgcccggaagaagtagacatcaccaaagacaaggcagattttgccactctaagcgatggtgaaaagcatatctatttctccaacctgaaacggcagaccatgctggactctatccagggcgcggccccgtttgaagcattcggtgcctgggcttctaccccggaggcgcagttcgctatcctggaatggacccgccaagaggcaattcactctctgtcctatacccatatcctacgcaacacggtcaatgaccctggtatcgtgtttgaccatgtgctggacgtagctgaaattgttgattgtgcacaccaaatcagcacctgctacgatgaatctgtgcgctgggcgggtatgcgtatggcgggccggatcttcacccgtgaagatatcatgaatgcgaagcggtcattctggcgatccctgtttgctgccaacacgctggaaggcatccgcttctacgtttcgtttgcatgctcctgggcattcgtccaattccttcaaaagatggaaggtaatgcgaagatcattcgccagatcgcccgcgacgagcaggaccacctgatcctcactcagacattcctgaatcgtcttccgttgatggatccggactttgctgtcattcgtgaagaacttcgtgctgagatgacgcagatgttcatggatgtcgtgaatcaggaaaaacagtgggctgactatctgttcaaagaaggttctatcctgggcctgaacgccaagatccttcaccagatggttgactggctggcgacacaccgtatgggtgctatcggccatccgtatcctggggaaccgcgcaaagacaatccggtgccgtggattaacgactggctagataatactacaatgcaatacgcattgcaggaagcagaagctcctgattatctgatgggcatactgactggttcagtatctgacggtcttaaatttgcataaaggtgagaaatgattacgatctattccaaacaaggttgtgcacagtgtgttacagctgagaacatctgtcgcattcgcggtattgagcatcgtatcctcaaacttgaaaaggactacaagttggaagatctacaagctctgacgggcaaacaacgcatgtcaatgcctgttatcgttctcgctgaccagactgtgaccgacgttgctggtctcgccgcaagcgttaaacgctgatcatataaagcccccattccgggggctttacttttgaaaaagccagacctatacttcctgtacacaccaaatattgaatagcaggaactatatcatgtcaaatatcttacgcaaccccggccatcattttggatacatccaactcccgttggtcatcgacactttataccctgaagacaaagaacagatttgttggtctccagcggccctcattgaacgagagatattcaaatcagaagtggatgtcatgtaccggtttggggaaacgggcaaattgcaatatatgggcaaggccaccgagttgcgaaccaccagagaacaaagatttcttcgtattgatacgacaaattgcgaattctttgttcttctgaaggaatatgtgacacggaatcgcccggtttcccagcaccgcccgttcttgtcaagtgtgcatattgacaactttatctctgacgttcaccttgtggcttctactcttcacgatgaagaaactggtgtaccaaaggacacagtcttaaatatggttgtgatcacattagtggagtaagccgctatgagcgatttagtcttgaatacccaattccgtcttcctgtggattctcttgttccgtttcaaatcatgaaacagatgcttgaagaaggcatggaagttccgttaaaacataatggacaagatatcgggcgctgtatgagttgctcatttcaggatgatgcgtattgggcaatggactataatgctcaaatgccaattgaggctaacactctcatggaattgggtttcattttcaaatcaaaaccaccaattcggttatacgatatcaagcctgtggtaatacagatacctgctggcaaatcaacttacatgtacttgatatcgcattttatgttttatgacgttgcgccgtcagttggtccgttgtaaccagatggtgtcagtaatcggttcaggatcattcacgacgttaaacgtaatggtgactgccagggaatggtagtcatcagacagagatacttcgacagactgtatttctgccctcggttcataaagagcaatagcatcttcaactttgttcttcacatccacctgaatagtaggcgtcgtgttttccccgagcattccataaaggccagcacccatgtctggtagagtccgccattcacctgccgacgacataacaatattccgaacagactgtaacacagcccattttccagatttcatcgtgacgtctttggtaacaggatgcatcccaaattttaggtccacatctttataatctttcatgttgaggctccctcagcagcatggagaggcattatctgcctctcctggtgtaatcgtatggggttattggctggaaccaaaattaccgccattgtcttccagttccggtttgatatcgatagtgcccggccctgtcggtgacgctggggttgcaccactaagagaactggcccggcccgcgccttcggcatatttgatattaccgtcgatggtctgggctaccgtcaatttatcagcgatgatctcggacacgaggatcttaggaaccttcaacgtacctgacacttctaacatctgacaaacgatacggaaaatattctgcgcctggatttcggcaagctgagaatatttcatcaaagatgtcccggcaaccacgtgtgaatgattgctggaatgaagatgataaacttcgcctgtcttgcgctgaacttccgtcccaccaacagtcaggttatggtcacgaccgacataatatcttttgtcgaacatcgcaatatcatagtggtcttttactgatttattgaccacgtcaccattcggtaacatttgtttataggaacccgattggtgcatccagtggagacgctcaccaccaggcgtatcgtctacttccataatgtgaccagaacgggaagccataacattgttgtatggatacaccgaaccgccagcagatggaactatggtttcacctgtgttatcaatatcctgtacccgaccagatggcggcggggtctcttgtacttttggggtgcgatcaggaataggttcagaccatttgctgttttgctgtgctggagcagccgccttcgtgttcgctggaccgggccaacgataacccaaaaccgaagaacgactgaaacggctgaccttcacgctgtcagattggttgcccccaaggcaccatacataattcgcatcaaacttttgaacaaacgcgacgtgaccaaaagtcgggttgttcccccggcggaatacgaccactgccccatatcttggttcagacaacggagaaccccattgaagatatgaacgggccaaagcagatcgtgtagatgtgaatccagcctggaggagaacccaaccaacgaatgcagcacaccaactcacttcgtcttcagatgctccaagagaagtggttttgtgatattctacaatccttgggttgttgttgaatttaccagcatattccttcacccccaattcgcctcgagcgacagtcatccatttttcaggatcatatccatctttgggcggctctgggtcaggttgaggttcgtcttctatttttacaggaacatctgtaacagcattatatttttgacgttcaatagactgcacaacctggccgagagccaacgggttggtgtcagaaccattaacctggttggctgctggccatacccaagctattctcaaattctggtatgcttcgtcaagggcgaaccccatgacttcactgttgacagtaataccagtcggagaccagcctaaacctgccgaggacgcatttgttgcaggcatcatgagcacagcccatggtaacagctcagtaggcaggagagtagtgtcttgggtgtgtacgccgtatacacggacggcaacgcgcccgttttcttcgggatcattcacgtcttcaacgcgcccataaaaccaacgcatattttctaacatagtgatgtccaaatgtgtagaggatgttgaagatatttatgctctgtcgaatataatattataggatgcgtcagcatccgttgtatttgatttatttcaactcgcgttgctcgtgaaagaccgtcttacgcagacagcgcccttccaatgccagggaggcataaggcgaggaaacaaccatacagcacagaatgtccgtagaaaaacgatttttattccatcctaaacattcaatagcttagaagccaggagtttgttcaagaacaatgacattataagaaattgcgttcaagaaacaacaaatagacctgtaaaacaaataagcaataaaaaccccgctcatgcggggttttggttctttttagcaagacgagctttcaatgtctctgtaagcatatcaagatgccagggcattaattcgcttatttcaaatatgctatagccttgtgacttcaattcgtcacacatcacgaagtaggataataaatcaatttcaaaaattaaatgaaaatctcttcaagactattaaattcgatcttatgctctttaccgcaaccaggacacttaatcttggtttcaaaatggatgcgcggtattttggaaaagaaatcgtctttaattttctggataatatccgtttccaggttatcgccaacccattgtacaaactcatcacgagttttcttacgagcaactgctacctgaggatcaatacccggttcattaggatcatcaaaccgccaaacctgaccgtcatcgtcatacaaacaatcgatgaatgtagcaatgctctcttcgatagaaaccactttctgaagcactccagcatcagagaaggatggttgacgcatcttgatgtgatagccacccggcaggtcgaagcattctgtaaacccctcgacgccccgcgccgccaccttgtccagggggataggaacaacgagttcttgaccgcatgcttctaaattgtccccaggataatcaggatcaaccgaaggaactttgatccggttgttgcatttgtaccggattttcattacttcaccgattgatatacaacgcatccgaaggaaaacttcttctacaacaccgatcgggagtttggcaaatggaaccccagcgtctacacaagacgaaaataatgattccatcgttgcgatacgttcatcatcaggagtgtttgggtcagccacctgaagtaaagaagtttgttgccccgcagtaaacgcgcgatacttgatgacagtaggccaaaattggcttttgagcgttctttctgtacgaggcaatgatggtaaattcataatgtatctccacggtatatttgtacagatatttatagtgaggaacgaaaatgcatggtttctgttttagccagatcggagagcaattgacaatacttcatcctgatgctggtactgatttctatttattcctgtcggattatgcgagacatttgggtgtagacaccatcgcaatgtctaaagatgacatgaaatttggtaaactggggacaaaagatttattgagatatggattcaatgtcattgtcgtagatcctgtctatagccctattcaggatgaagacgttatacccgtgggtgtacacaggaatattgaaacattacacaaatactatcccgattgcattgtgatcggagagatcattccgtattttcataaaagaagacgccttcaaacgattaaaagttattttcaagaaggccaagcgtccgttattatggatgtcctcacaagtggttgggttgttaaaagtacgactggcaatagccaacaaatcaattcccgtgtatatgaatatgtgaaagaacgagactacgaactggagaatagtaatgcaaaacgaaaaacgcgccgatcttgagcagttgaaaacagttatcatcaatcgcctaaaggccgtcgtcaccaacgataaaggtgaagtcgcgccggggtttgaaggtattttcgatgaattccaaaccgacgacatgggtaatccggtcatccaaaccgtcgccgggatgatcatgatcgataaagagatcctggaaagcggttctgttcgttattcaccgaacatgggcgttgaagccgaatccctctgttccgaagtgatggacattaacgaagcgatcagtgaaatcgggtacaaactgcttatctgtactggccattatgtggatcctcaggggcagatcgcttatggtgacgaagcacgtaaagtgaaacgccacgttgaaactagcgttttgctgaacaccatccgtgagatgcagaaagagcaggaaagcatcaagccgcgcctgatcctgccggatagcaaaatcgtcacccgataaatcggtctaaatacccataacaccaatgaaactatgttatgggtatttttatgaaatattgcggaattgactactcttatggttgcccagcgatttgtgtctgggacgacaaagatcctttggaatttaattcccttcgcttctatgcatattacacggtagaaaaatattgtcgccctatccgaccgaacatcagcattatgaagcaacctgcatattcctcccctgaagaaagattctataacatttccaaatgggcagaagctgttcttcttacagagaaacctgatttcattaccctcgagggttatgcgatgggcaactctaagaactccaacaacatatgccaaaccgctgagaacacttctcttttgaagcaagcaatgcgccgtaataatatggaattccagataatcactccttcttataccaaaaagaatttcactgggaagggaaatgctgacaagctggtgatgatcgcccacttcgagaagctgttcaacgttaacatgcgcggtataatggatatgttggaagttaaagatccgaagccaatcgatgatcttgtcgatgggtttgccaatatggtaggcggttctgctttcaaagagaatcatcccgaatttaattctgaggtgcacaatggttgattattggttattggcgaatattatcacgttcgcattattgatggcgacggcgttcgtttggttaaaggcgatgctgacattcttgtcttcgttggcgatgcaaatatcgtattattctgtgacaccgcatgaagaccagaatattcgggctgctcaacagagcgaatatctgtccaaatatgttcatttacgcgaacgctcggtcacaatcgttttgttttccacaatgctgtttgcggttatcttatttgtacgatatgtaatggaggccatccatgccgttctatgattatgcatgcaaaggatgtggtcattctttcagccagcgaaagacctgtgctgagcgccatactcctgaacttgatccctgcagcgaatgtggtggtcagatttctatggtaattggcgctccaaaaatcgtttccggtgtccgtggtcctcaatctgctccggacgggttcaaagatgttcttcggcagatcaagaagacatcgggtaaggggaacacaatcgatgtctgacggacaaatcgctcaggtgttgacgcctgattcattttcagagatggtattgatgcgcgcacagaccaccagggaaagcctcctggaaacaatggccagcgtgtgcgaagagtatgatattgaggaatctaagattcgcaagatgattacaccgcctctgttatcccgtttaacagctgagtgcgctgatgctcgtttgttgaaaggtgaactgaaatccaagaaaattttataggttgttaaaatgactaaagaacaagtctacaaattgattaaggcccaaggcttcttgcctggtgttacccgctggcgtgtgggtagtcttaacgagcacgaagaccaaactgaccggatcaaattcacgactccggaaggcggtgtgtatgtcgtggaataccacactcacaccgatgccaaacgcactttgtctgacgtgttcgatattattgagattaacccgaaagaacaattacttcgcggttaaatcaatcaaatatgcgggggtataattactcccgctgtgaaagaaataatgtgtacagaatagccccctggggcgatactatcgaggaaagaaagaatgtctagcttatttgatcgtctgaagcaatcccgtggtcagcaatctgacgctctgcaaaaacgtctggaacaacagggccagcgttcggctgcagcaaaggatccgcgtatctggaaatggacctggaacaaggaaggtatttccgaaaacatcatccgttttctccctatcccgctggtagatctgaaagcacaggaagaaggcaagatcgatgctgagcagattcttactccggttgcgatgatcatgcgtcattccttccaaggtaagggcggctggtacatcgaaaactctcctcagaccttcggccacgaagatccggtgcgtgatcatgatcgtccgctgtgggcgcaacaaaaagagaccaacgacgaaaaactgaaagaagttctcaaaggtcgtctcccgaacaccaagtattatgccaacattctggtgatcaaggatgttaactccccagaaaacaacggcaaagtattcctgctggaattcggcccggcgattaagaaatttttagacgcggcccagaacccgaaattcgctactgatccgaagtttgatccgtttgatatgtggggcggcgccaacctgattcttaacctggttggtgagaaacgcaaattcggaaattgggaaggtctcgtgccactaatggataacgtgaaatgggatgcaatttcttccctgggcggcgaaggtgaagaaggcgacaagtacaaagaagacatctgggaaaaagaacacagcctgtttgagttcttcaacccggccaacttcaaatcgtacgaagaactggaaaagcgtctgcgtaaagccctggctatcccggacagccagccactggtagaaagtggtgcagcaactgtcgctacggctccggtacatcaggaaccgcaacgcccgacggcccaggatagcctgaaccagcagcagtctcagccgtcgcaagcgcagcagagcgttcagactccttcttctactggcgctgatgctaagcatacgtcgtctctggacgagttcgagcaattcctgaaacgtgaataacaacacaaagcccccgctgggggctttttaattgctggcgactctcttcaacatccccaacagactactcttttcagatgccgtcaggttgtcattgccgagaatatccctctggatgccgatagagatgcgctcgaagtcggccaggcttattcccgccatattgtttaccaattgatcgagttgcttgtaggcaagaagggcttcacccgtgaagttgccttgctcgagcttcttataaagctgcccggcctttgacgcagcggtttcccaatctccggaagcaagagcatcagcaatacccagaggaagaaagtcgctggcgaggctgcgtgtttcatattctgtctccgataggactttgttgtatgagaatgaaatattgtattggttaaattgatctgtggcacctttgtcaagttcaatagacgagaagtttacaggatgcgcttcaacaatataaacccgatggacaacctgatcttctgtatccaattgttcaatgcaaatatcggttacaaaatcttcgtaatatcccatctttgtggtaagaggatcgaagattaaattcttccatttgtccataacagacttttcataatagtcattggccaaaaggaatgagagttccaaatcaacgtttgatttgttattcggcattttgatatggttgccgttattattcataggtgtcgtgtcgataccgacaccaggtaatgaagcgaccatacacatcatttggagagaacgagaagtttggtttgtccctccaaagaatgcgtttacgatacgcgctgtggaacggaacaagtcaccaaatgacgttgtatctgaggtgtacgcttgaccatcattggctaatgtagcattagagtcaaagatgcctgcaggcaaggggatagtcacctggaatctgttcttccttgacagaccgcgctgcaacatctgtgtaataaaattgcgatagtcttccacgatgaggactccacttaaataatagatctgaaggtatttataggagttgacaaatggcaaagaatgcgatgggtgaagaagatccgctgctgcttccagccgaaatggatgctcccgaattggtgaagcgctacatccgaaagtaccgccagcacttcggggccgaagccaagcgtaatattcgccgctcccacgtgtggttcatggaacgtgtgtctaaggatgccaacctgaccccacagcatatgatgaaagcatttgctgaaaacaagcgcccggtacagggtgtccgctatatgatcggacgcatgttctatttcaaatatgatgccctgacaaaagaagagttaccatactgggacatgtatcccttggtatttttcttcaattttgccaagggggatgggattaattttggtgagcgtggcgtgacttatctgtgggggcttaaccttcattatcttccgccaaaactccgacttttggtatttgaagacctgattaaattgaggaatgaaagggcatatcgttccaaaacccgtttgcgattaacgtgggatgcattgaaacggttcgccaaccatcctctgtatgaacattgtgtcaaactttacagggctgatcggttcagaacacagctttatgaaatcgaaccacaatattgggaagttgtcctctttatgcgtactgcacgcttccagaaacaaagccaggccagcgtctggaaggatgctcgcatgcgccataaacccaaaaagtgattagttctataacccgtttgcagcgataattcgcgaacgggttcccttcaacaatgaggctttacaatgtctactatttatcgtattctcggtattgaatttacaccggctcgtcttgacgcaacacatccgttatctaaaggaaagactggttttgaaatcggccgggattctttctacaaaaacggtaaagtgcccccaacgtttgcttccatgattcgtgctatgggaatcagcgaagattcagaagccgaatatgatatgaaagacctgctacgcatcggcgatagtgaaacaatcgacttcgtgcaggattttatcacaggatggtcgcactccagtgatttgaagaataaggctaacaaaacgttgggctgtttttcatatgcggttgaatatctctgttcaagaagccaaacaattgaattcttcagggacgatctgttatcggctcttggtgaatccgatttgaggttagtggattctgaaaaccgtgattctaacctgcgtgacgcgattgaatccaatgaagttcatatcgtcaaggaacgcaatatctttttcggtggcacccaggggttcaagatccaccctgacctggtttacactgacgaagtttgccgtactctcacgaagttcttcggcaaaattaatgattcgttatatgtcgctatcgctttgattatgcaagaagagcatttcgaatccaaagttcgccaaattcgtgaacacgtgatcgcaggaagtgatttcagatcgaccgaaccaagcgaaatgcccaatttctttgataaaaaataatctgccgcgcgcctggagatgtctatgagaaggtatttgaagttctagaatcattgatagaattttatatcttacaacatctccgttcaggaaacgagcacattgacgacttcctcttgtatgatcaccagataacgatccattcagttgaagtcgttgatgacgatctgctcctggccaacatagagcacagtctgtatgataaccaggcgggtaaatactgtgctccggcattttctcaggtagagataacaccatgctggcctgccgaaaaagttttcaatatagacgatgtggtttatgatgaagcgaactctttcagatagagggttgtgaagaaagtttgttatctgaacattctttttatagaaagtggtttacaatcttcaaaactacagtatagttgaaaacaagcgaaacggctttgtcagccgaccgatttacaacatataggatctacactatgtcttacattctccatattgagtccggcctgaaatttgatattgaaggtaaaactgcgtctgacgttcagtccgaaatcaaagacgctggtctgctgatcggtaacgtaaccatccgccgtatgctcgacggcgtcctgcaaagtgccaacgggtttgagctgatcgattccctgtctcaagaagagcaggaagaaaccctggaggctctcgaccgtgcgaaggccgaagaagtccagccgactgacgttgctggtgtgaaagaaggcgctggcgatgccactgcggttattgacgctgaagaaaccgttgaccagccggaagcggaacaaactgcaaattccgaagaatctacggaaactgctgaacaggctgacccgcaggaagtagaagctgtggcaaacgcagatgaagtccgccgccgtatcctgggcactaacgtggcagaagcgctggccgaaggtggcaatgccgccgaagacgcttccctggctgcgaaatctaagctgaccaacctgaccccggcagttgcgccggaagatcgcaaacgtcgccataacaaacgcgaagaaatggttgaagccgcacgttcttccaatttcggcgcgatcctggcagcagtagaagcaggcgtcattccgggtgtttacctgagctatgtcaatccggatatgcgctggttccagttcccggtcaccgacctggctgataaagaaaacccgcatgcgcggactaacacctacgtcgatctggcgccgatcacttccggcggctggggtttcagtctgtacgtgaaaggtaaatctttcaccaaacgccagaaaatcaaagagaccgatgcggaatctctggttaaagcgatcaatgaatggttgccaggcgctctggaagaagccaaaaacgcaggctgattttaaatcagattccgttcaatagacgaaggggctgctataatagcagcctcttttgtttattggggctttgtatgtcttatacgatcaaaggtctgttgaaaagacctgtccatttgttccataaaccgcctgccgttgtcggggaatatccggcaagaggagagctttattatgtcaaaggctccaacggtagtggcaagtctaccgttccgtcctggatggcggagaatgatcctcaggcatatgtcgtgacccacaatggtaaggtgatgctgaccgtttgcccatcatttaatatcatctgtgtcggcaaatatgacaaatcgaaatccaaaggggttgactctctaaaagacacagagcagatgctattcgctgtgtctatcaccgagcaacctgaatacatcgggtatgatgtgatctttgaaggtattatccctgctaccttgctcaatacgtggattgaacgtctaaaccgcccgacccgccgccttgtggttctgttcttggatacccccaaggaagtatgcctggcgcgtgtgagttctcgcaatggtggtgaagacttcaaacacgaactcgtcctggagaaatggaagcgtgtcaactctcaccgagagcggcataaagagttgttccctaacattcctgcgggtatgatgaagtctaatggtctgaccgttgatcaggctgtatctgcgtttctcaatcgtgattttgggagtattgattgatggaaatttttgctttaaacaacaacgacatgctgaagaaagctgtcctggctatccgtgaacatgggattgagtctgatcccggtaatgcggagattaataccgatggcacccggtttcttgatggcgtgaccataacagtctctgatatccgtgaccgctggctttccgttgaaggtcgcaattcttctgcgctggctgctattggcgagaccttctgggttctgtcaggtcgcaatgacatccgtttcctttcccgagtactcccccgcgcggccaacttctctgacgatggtgtaacctggcgcggcgcgtatggcccacgcctgtacaatcacgggcagctggatagcgttatcagccgtttgcgcaagaatccaaatacccgccaggcttatctgacaatctacgacccggcactggactctgatgaaggtttggccgctcataatgaaacaggcgaagccaagaccaaggacatgatctgtaatctggctcttttgttctctattacaaacggctgtctgaacatgactgtcatcaaccgtagccaggatgttctttggggaatgtcttcgattaacttcattgaattctctattcttcaagaagtgatcgctaatgttttgggcgtgaacgtcggccagtacaagttgttctccaacaatcttcattattacaacaatgaagtaagccaaaaacagctgagtaaaatcacggcggataccgtcgtggtggaagaaggaatgttcaaagacaagattattttcaataatgaaattgttgaagagcagaacggaatcctgtatatgttccgtgacgtgttggaagcgtgtgaaagtggattatcctggccttctgtattggggatgttggaacgctatggcgcggacagagggttgttgatgcaaatggcgtattgtttgtggtgccgtttgaacggtgttcttatcaaccatatgtatattgctgatgatgggttactgaatgctctccgccattctcctgttgatcgcaaatatatgaatcctcgttctttgggtggtgacaaatgatgtatcctaatctggaattcttcacggggcgcaagcgctccggtaaggacttctgcctggagtccattattgaagcagaccggggtatccgtgtcgttcatcgtctttctttctctgatgagttgcgccgggtggccaattacatttacccttggctcccggttgacgtagacgattccatcaaggatctgccgttctcacatccggataacgtacataacctgtcgccaaggcagatctggctccatctgggcaacgataagggtggtttgcgctatgtacaacccgatctgttcctggcgttctttaaacgcttccagttgcctctcgtggaggctaaccctggtgtgcactatatcgtgagcgacctgcgtactccgcaggaatataattgggcgctgagtactaaatgtcccatcacgcgcatttcaaagcccaatcgttctggtatagtagaggacgacgttgaggcctatatcgaccaaatggttgttgattatgactatgtcaacaactttgaaggccgtaacaattttgttgaattctacaggaacagaaaatgataacagcagatcatattaaaagactgctccaactccaagaggccactaatgtggcctactttggggaagagtgggaaaagtattggactcacgttgccgtaacgaactcaatttatcgtgaatgggcagaattccttgatgaaaccaccaaggattggaagatttatgggaatggtatccatttcaatagaacggatgccgtctatgaattggttgatgtggtccattttatgctgtcttccatattgtccgggtatggttctgcgttcccgatcgaaatgcaatttgatcttttcttcaaggaaggtcaggtaatagacaaatctgctaatctggtacatgtcaccgaacggttcacgtcgtttatgggacaacccgatatcatccggtttgtacggttcttggtatgcgcctgtggttatctgggactggacgccgagacatacatgctggcgcacaaacgcaaaaatgatcgtaatcggctgcgcgctgcaggcggcgctgactacgacaaatccaaagagatccctctgaccctggagttctaatgtttacgattaacatctccatctcggccgataaccttgagtcatcggttagcaatttcattgagcacatgaagcccttgggacatgtgatactcaattgcacattagacgttgaaggcggggttgcggagatgttatttacaacaccttccccaactgaagcattcgtcttgattgagcgctgggcatcggaggacattcctgttccagcgccgttgcaggatatctatttcagtgagacgatttattcactccataccatgcccaaagatgttagccaggctgatattgttcgtctgattaatcataacatcaactttgggtgtatcgttcggcgtgataactatcgtttacgcaatcatttcctgtatgataaccagaaccaagtggatgaagattcattattatccatcaaaacgatgcaggaagcgattaatattttgtctaagaaggttctgggtgcagaattattaaccacaattaacaaacaagaggaagtaaaatggccagttcattaatggatcgcatgttgaaagttgctaagaaacatgacgatcaggcttcggtattgtctcagtcagacgcactggacccgaaaattatctgctcgactggtattccccttattgatatcgcctggtccgggcgtgttgatggcggtctgatctctggcatcaaaatgatggtcggtgattctcgtacattcaaaacgatgttcggcctggttgacgtcaaagcgtacatggataaattccccgacgcgatctgtgtattcgccgattctgaaaagggtgccaacgcagactactggacatccatgggcattgacatggaccgtgttctgtatgtcccgatcgataacgttgaacagaccaagatccgtctgttgcagattcttcaggaagtgaagaaaggcgataaagtaatcgtgttcatcgactctatcagccagttaccttccaccaaagaggtagaagacgccatcgctggcaaagatacccaggacatgacccgcgcccgcgccctgaacagcttctggcgcgtcattacacccgagatcaacagcaaagagctggtgttggtctggatcaactcgtattatgatgaaattggcaaccaatatgctgagcctaacatcaaaggcggtaagcagggattcctatcatctaacctgatttggttcatcacccgttcccaggtaaaagaagacaaagacctgctggggtggaacttcaacatcggcatcatgaaaggtcgccatgttaaagagaaagccaaactccctgtcacggttctgtatgacggtggtattgatcgttggagcggcatgctggaaatttctcgggcgcttggctatgtcgatatgccaacttctggctggtatgtccggacagccaaaggtggatttgatccggaaaaagagaagaaatatcagaagcgtcaaatggatgatgacttttggtatccgcttctggaaaacccggacttcgccgatgacgttaaaaagatgttcggcgtttccaacggtacggtaatgcctgcgaatatgctggagcagatggaccatgttatcaacaccagcgaataacaatggagggggagtcacctcccccgttaattacgaactcatcgaccccggtgaaggccaaatatccatcatccacattttggagggccaattccgtggtgtcaaattccgtattgggaaagtatcctgggaatggtctgatgacgcaccccggcttatttttaccacggatattttgaagaaatcttggcgtcttttctttaatgatttgaaaaataacgacttgttcactgaagtgtcaggccgtatcttattagacttaatgcagaagaacgctcaggaatacaacaaaattttggtggggtagttgccaatgttactcgaatctgtcgtgctttcccaattgatttacaatgaagaataccaaagaaaaatattgccttacctgaaagccgattatttcgaaaatgaaggtgagaagattatattcggattaattgacgattattcgtcagaatataatgctcgcccttcggttgatgctctgtctattatgttagaaaagatgccgctcaacgagcatgtgtttgaacaatcaatcgccgctctttctaatatcaatgacaatacattcaatcaggaatggttggtaaaagaaactgagcagtgggcgcgcaataaggctgtacacaacgcgataaaaacagctgttaacatctatggtgacaacaagcggcaggaggagatgaataatatccccaccatcctgcaagaagcgttgtctatcagttttgattcatatcttggtcatatctattgggaaatggctgcagagcaatatgaccatatgaattcaactggagccaaaattccattcgctgttgagatattcaacaaggctacgcgcggcggtgtaggcaaaaagaccctgaacattgttacgggtgctatcaacgcaggtaagaccacaaccctgatagacctggcggcaggttattcagagcaggggctgaatgttttcgtctttaccctggaagttgctgagaacatttggcgtcaccgtcttgacgcccgtattatgcgacgtgattttgaagtcgttgagaagatgacccgcgaagagtacatcgggacaatccaaaaattaaggacaagagacaacggctctctgaaaggcgatatcgtcatcaaggaatacccatctggggcagggcatactggattgtatcgtcgagatattctggaatatatctcatcaacaggcatctctcctgacgttatcattatcgactatctgggtgaatcggcgtcttcgcgtcttccggctcatcttatgaacaacaccaacgtatactatacatctgttgctcgtgaattccgttctcttggattcgaatttgattgcccggtgtggactggcatgcagttcaatcgtgagaagcaatcagccacagacgggaatatcagtgacctggcggatgctatcggtatcccgaagatcgccgacttcattatggcattctatgcaccggacgagttggctgcagtcaagaaggcccgcgccagtatcctcaaaaaccgttatgccaacaaacagaaattgaaatcgttcttgtttggtatggatcaggataagcagattttgtttgatcttgactggaatgaggttaaacgagatctcaccgaagaagaagccaaatatgttgagaatgttcatattaaacatgatatgaacaaaacagggaacgttgtgactgacgcgaagaaagcagaaacggtcaataactggaactttggttgatttcaataaacggatcgtgaggtataatcttcatgatctgaatataaacccaggagcacatcatgttgcacaataatttcatggcggatctgctacgcgccgttgagcaggtgtgccacaccaagaaggatacgatcaatctagacttcgctcagactatcgaattctttaaagcacgccatacttggaaagaccacaatgtgaaagtaatggcgcaagaaggggaattggttgaactcgatttgccatcattccctttaccggtacggaccgaaactcaggaacaatacgaaattgaaggcgttcgcattattcctaagtttggttatcatagtatcgtttacttcttcctgagccggattggggcaaatatcatcccgaccggaatgcgtatctaatagagggcttaacatgtctgtagaacaaattggtttttatgaaatcccgaacgacccggcgctgcgcaagaaactgtttgacaccatcgaaaactgccgcgccgcccaagtccgtatcaaatcagaacagacgtacatcactgatgcactgtctgaaatcggtaaggcgacaggcatcaaagcagctgatctgcgtaaagtcgtgtcagaccgcgccgctggtacttataccaagacaatcgaaaccagcgccaaataccaggatctctacgaatccctgttcccgaacgccgcgccggatcgtgatccgaatacttccggtgaatgacagaccccaaggcccaacgttcgttgggctttcttactttcaaaacctttacttcaataaacatccgcgctatatttcattttattgaattgttgtttctaaatcatgaggtgaaagatggacgccaaaacctatcagatcccgctcgacaatgtcgtaattgtccaggaacgcctgcaaaaattagagcgcacggcaaatcgactggggctggtattcccgacggtgaccatcagtgaaccatacagaacccaacacaaagattctacgtctggcgaaattttctatcgttggtggcgggacatttctcttgaaggtgaaggcattgaccgcccggtttcatacggcggctggtctatcatcggccagttcaatcatcaatacccaaaggtcattctcaacaaactgaccgacgacatcgtcccgcatttcattcaacggttcgaggcagagaacgtctcttggtgtgagcattgcaataaatcagttcgccgcaataacacatatgtggttcgtaatgaaaccagcggagcgcaaatgctcgtcggtagcagctgcatgcaccattacgtgcctcaccagaagtccctggatgccgtaatgggttattacctgtccattcaagagctgtttaataaccaggacgaagatggaatctacggaagccatatcccgactaccgccgatacccggagctatctgcgtctggtgttccagatcttactgaccggagtcagcatcaagtctaatttgtattctgttgtcatgggttgctttgtagcaggtgaagctccgaaggacaaatcatctgaagcatgggagatttatcagaaggcaaaggggttctactttgatgccctaagtgagatggatcatatgatggaattcattgcatcgctgcctcagaccaatgacttcaatgttcgcctgacccgtatgtgtgaagctgggtatcatctgatcaaggattctaccactgttcgctggggtgccgtcaaatattacgaatacctccaccgcgaatgttcatgtaccaataaggcagaaacacgttgggtgggtgaagtcggggagatgattgagaagaccgtcacctacgttgatcgcaagttcctctacagcggggattggggtgattcctatctgtatatcttcaaaaccgaagaaggtagtacgattacatggaagacttcctatattgatgcggacctggaaggacagatgattatccggggccgggtgaaagaactgactgagtatgaagatgtcaaacagactcagattaccagagcaaagttgaggacgttatgacattattagaaatgaatgctgcggtgctaaccaaattcattgcaggtgaactcaagatcggactcgccatatttggtatcactaccgttgccttggccatatgggttctgatctatctgattaagaggaaagattgatggaatgttcatgtggagggcaggggacgagttcttacatccgttaccccactgtgaaggaagccgaagccgctggattccgcgtagaaaaggctccctgtgtaatcgccttgaaagactgtccggtctgtaagaggcactctcaggacgtctggtatgagccaggcgctcaaccaaagacagtcaatttgctgtccatgatggggaaataaaatgttcaagtttcttaagaatcttttcgtaaaggaattgagcctggaggtcaagtatctcgtcgatgccatcgataatgatctggtgacgatggctgaaacgaaatatctctgtgccaatcccgttatgtataatggcgtccgtgtctatgcatacactgtcaacggtccttccggttacacggttgatctggacgacaggcaggattgtttaccaagacatgaagccaaggcggtttaccgggcattgtgtgctcacaccaagcggtttcgtgaaagaaattctcggaagcgtgaaatccaaaaccgcgaattttcaaaatctaaattgggtggattatgaaagacgttactgatgaccaattgaaggagatgtggcgacaaactcaaattatcgcccgcgataaaatgaaaactatccgagcgctcgaaaatgaactcggggaacttaccaaggactctactaatttagaggtcgaattaatcaagcgcggttatgttttcaagcgccgtttttgggaatattgatatgacaactctcgtagaaacattatttcctggctgcatcgttggccgtgggtgttctgaggccaatggattggaagcagacgtagaaccgaagaactgtatcatcattgataagttccatgacaatcattatcctctgaatcatcgccgtgatcattacctggtttcggtcaatggttgtcttgtatccttgcgtatttgccaggccatggatggatccgggtatggtgcatttgcctatatccatgatgtgtctaatggcgtgttgggtcaggaaaccctgatcgaaaaattcaaaggatggaaagaatcgtttacttcttgtgaaccaccgaaagaataatctataaaaatcccagatataatatgggataacatataaccaaatgaggctgaacaaatgtcactgaaaaacttactgaaacgcatcttcaccactgttgaagccaacgtcactgcagggcttgacaagctgaccgatacagaaaagcgcctgaacctggccgctcgtaaactgtcagacgaaatccgccgcctggaagaagcccgtgtctcgaatgtgcgccaggcaatcaaaatgcgcaagaccgcggaagagaacctgggtgaagctgtcaatcgcgaacaaatcctgaaagacgccattgcccgtggtggtaaacctactcgttctgaagctctgattatcttacaccgccgccgcatcggtgaagccctgttggtgaaagttactgatatcgaaaacagtaacaaagaactgaataaggccatcatccaactcggcgataaatttgatgaaatcaaatccagcctggaactcgtccgtattcagaaagagactaacgaactcggattgtcacttccggaagacgttgattatgccgctggcatggttaatattgacgttgacgcaattctgcgtgaagctgaaatctctgatccgaagtgttcggtcaacagcccttcgaccattgaagccgacaattatctcgccagtctgatcaaataataaattgaggggtataacccctcaatccattagggggatttatgatcatcattgatgggaacgatattatatgggggttggcagttttatctctcatattcgcagcttttaagtttttcaaagctgctcaaaagaagaaaggtgaaaagaaggccaaagtttgttgggggtacaccgacctgcccagtctgaaatacgctttgtcgatgcgtaagagaaatgatgacggttctttacaccacctgacggactttagtttggatgcacggcacccagatacatctgccgttgaatacttctattatacgatggacggtttgaagtggcctataataggggatattgttattaaagaagaatgtatctcttgtagggtatatcccacagacggtaattggatccgggtttggtttttcaatcttaataaagaacttgaattcaccaaaaaattattcgatctttttaaagaatatgaagaatctggttgtaaaccagcgcatggcgacgaacctatagaatccatcatacgccgtgcccatggcaaagaattaaatgaattggaaaaatacggcttttcctggggtgacgaattatgccaatgatcgcctattttgtgctgtatatgacatatgcggcaggatttttgtatatggtgctgaacaccgatgttatctgggagtttatccataaacagtatatgaaaatcaaaactcgctatactggagtggatatcgattcgatcatcaaacaagctcgctcccgcacccgccaataatttattgaagtctttggggttataattggattacaaataaccccggagactcaagatgattcctctgttagaagcaattcacactcttcgtgagaccaaaggcaccaatgccaagaaagaagtcctgacccagattttgaaagaaaatccggacatggtcgattttcttcagtatgtgtatgacccacttctttcttattaccgtacaaagtttttaccgaatgctttccctcgtatgctgtcgcgcggcgtcgtcggtagctgggatcaggtgtacgatgttctcgaccagatgagcgaacgtactctgagcgggcagaaagccgatcatgaattatcgaaagcggcgaccaatattcacccggattaccacgaactcatccagatgatcctggacagggacattaaagccggtattgctgaaaagggcatcaatgcggcattcaacgcagcgggcgggaccgggcggctgatcaacatactcccctatcatcgttatgacaacatgacgattgacctgctgaagaagatggacttccggcgcggggtttacagtcagctgaaatcagacggcatgtttgccaacatcatctgccgatacggaaaagaacccgaaattcgttcccgctctggttctcttattgctggcggctcagtggacaacctatccctggtgtttaaggatatcatctatgatgctggagttggcgagagcgtgttccacggggaactcttggtagtagacctcaaacaaaataccatcctgcctcgtgctgtcggcaacggtaaactcaacagcgtgatccagacgggtgaacctttaccggaacaattccaggttatctaccgggtatgggatatcgttccgtatgaaaaatggttcaatgccgagcgtgttgatatcccatatgaagcccgttacaacatcatctcccaaatgtttgacgatgatggcctcgtgcaagtccaggaaacccgtgttgttcattcgtttgcagaagcggtcgagcatttcaaagacgcgctatcccgtaaagaagaaggcacgatctgtaaggcagcagatatgccttgggaagatggtacgagcagccaaggtctcaaactcaaaatggaaattgagtgtgatctggagattatcggatttaatcccgctgacgccaaaggtaagcattccaaaacgtttgggtcgctactttgtaagacctccgatagtttactcatcgttggcgtctcggggatctcagatgatctcaggaagtatatgtgggaacaccaagacgagttcctgggtaagatcgccgccgtcctctccaatggcgtacaggacaagactgatgatgcgttgaaatcactcttcctgccacgcctggtggaagttcgtaccgacaagaaggttgccaacacgctggctgaagtctatgagattcaaaaagcgtatgttgaaaacattctggttctattagaggccgcataaaatggatacgttattcaccctgatgtgtacaatgactttcgcgctgtccctggttatcagctcgttgtgtgccctgctggtgtggatagcgttccctgacgttgccaaatataaaatcttcatgtttttagccattattgtcatgagttttattttaacaattcactatgccaagcaggattataatcctgacaaacgttattcttcattggcggagagatatcatggcttcgaatttaaagacattaccagaaaatgattctgaatatttgcgtcgagttgttttggaattgggcgtgaactatagcggaatggccagattattagattgttcgaacgcagtcggattctggaagaaaggctatcgtcggatacccaaagcattccgccgggcgatcttgatgttgaaatttatcaatcaaaaaggactcatgtctgagttcttgagatatgtgggtgaacaggagaaacaaaatggtaactgaatgggaaaagatggaatatgaacgggcgtttaacgtttattgtatctttatggccatcaaactccatttcacgaccaaggattatgattacggtctctatggcccgatgagcaattacaaattcgaaacattctttgccaaagaaggtatgcggaaacagtttgctcgattggcccggcggtttgagacttctcaaggcgaagttgttgagaattatatcattgcaaatttcataaagtcacccaagacctgggtaacgactttgttgactcggcaggcgcaagagaattataacgaataccggaagctgtatgacaacttcacgtaccacttccttgacttttttgaaaagaatatgattccagaaattgccgggcgcggtctcacgttcttggattatcttaaaggtgacgggcaaaatcatccggcactattgaccgacatcatcatgaaaaaatatccgatttggtttctggtcggactgaacaaaataaccgggttcatcgcattttacgataaattgttgaaagaagacatttattggaattcagaagcgttcttgttgaagaagacggatgcggtagtacccaatgagaacacggattacgcaagaaataaattccgtgagatgatcctttcccacggaatttgatgttaccaatcccagagcagacgagtcttgtcagtctggttggaaggttccagattggtgctgttgaagttgttcgtcgtgctgactttcttagagttgtcaacattctgttggatcggagcgattacagaagcgggcggctggctgtacacagactggatttgtccgatgttatccgccgcccgcccctgtgtcggtctcgccgccccaagacttccaccaccgatagacccatatgcttctttcaactgagaggtcttgtctgtgacattctcagcatctgacgttactcccgaaggaataggcgtcagcgtctgtgcatcctggttagggagtaccggagccgtcgtctgatcctgtttgacttcaggcgctgcaggctgttgtttctgctggtcagattgtggtacaggactattggtcggttcttccgttccaatcatcatagactgacgggcttctgccattttctgtcttgctgtttcgccgcccaatgcgtcagggataatgctgacaaatttatcgacgatgtcaaacatagcattgacgatggcgttaatcatgttgaaaaacggctttttgacattctcagagaatcctttcttgatgctgtccagtgttttactcgcggctgcaatcccgtcatcaatgaatgaactgatcccgccagtgacccaatcaaccaacttgatgagttcactctggagattatcagccaacttaccagggatatcagtgagagaggtgttcttggtgatcccggcgaacagatcgttggatatccagttgacgatggagttaagccactcagcgggcttctcagagatccagagagtgaactggcggaacttcttgcccatgtcagtatcaaacccaaagatcttggatacccaatcgaacaaatccccaaagctgccgaccaattcggtaatacccgcccggacccggtctacaatggttacggatgctttccctaaaatctctttggcgttgatgaatcctttaccgaattcaaatacagaagagattaatgccagcggaccgatctttaagaatttcaaaactttaccaaatggacccaggagcttaacaatcccttccccaatcttggagaacataccaatgaatgcgcccacggcccaaccgatcgccttgaacggtttcaggaggaaccctttgagggcgttgaggcctaacatagcggctatggcagcacctatccctgatgagttctcgtctttctggtcatcatcttttgggatgatggaagtcgcccgtggattgttcttaccttctttcccttcctcgccccggcgcatttcttccttttcacgccatttctcgttgctgtcaaaaatacggacaagagcattaacgatatgaccaccagtcttgcctattttcttctcaatggaagataaccggaccagttgttctgaagagttcttgtcgataccttctgtattccatctgacttcgtccagagtgtcgccaatacgattcaaatctgaactgataccgacaagagttccttcctgattgtccaaccgcttgaggctgtcatcattggctgctttcaactgatctgatatcaggttcaaatattcagtattggtatcatcagcgggctggcggataagatccccaagacggtcaaccttctcgccgattttcatcaactcttcgttaccatcaacagcaacatcaacggtatctttcatccaaataccatagtctcgagtgaatatcggactcactcgagcgaagccattgacgaagtcgttgaccgaaggaattttgaactggaattctggaacatctttctgcttttcagcagtctgtagcttctccagatttttgttcatcttcaccagctgcttgttggtctcattttgagcgcggagttgtttcctctccatgatctctttcttgatcttgtcaagaacttgagcaacttcagtctgggatgtttgtgctggctcagccatggctcacctcttacaccttctgtgattgtcctttgtcaacagggactggcgtcggttgagatgcaacagcctgatttgtctgaggaggcagaaccttctcaatcatactgtctttagcgatctcagcaacacattgataatcgttagtcaggcgtgaaattttatgacgaattttcgttataatataatggcctgatgataacttacttaactcagccaggttttcattttgtttcggtctgtttgacagatcttcgatataatacacttgaccaacattcagacgattgtcaccaaccaaaagcaaacgcatgaccgtagatgccagactgaatttgataacacgttttgcataatcaacctgctcagcaccatctggttgcgcttcaagataacgaacgttctcacgattaaactcgtcagagaataaagggtatggatccagatgcgctgtttcagcaaaccattcggtgtacacacgagaagtaggcgtgacagttttcgttctgaaatcatacaccctttcgtctacagccaggacatcatgataattcgccatgaattggtcacgggccaatttcttttccgctttgattatcgtcctcatgaaacgctcagagttgaagttgttgttttgcagcaacggggcgtcctgtggatcacggaagaatttcttttcaagagcggcttcttgtttttcttcagccgtcatagtctgattaccttggttgaacaaagtagtcagacttttgaaatgatatcctgtgaaatcttcatagaaaacaaatggcatgaatatctcatcataagaccgccgggccatgtaatcaatgctcttgagtacaggccaaagcggtgtcgcgaatcgttcttggataccataagttggatctatgtcttcaaatttagtgcgcgattcgagcatttcaaatatctttgccgccatatcggaatatgatccttggagaccaaccgatttacgcagcatgctatctttatatgcatcagtagtgaccaggtgcagccagaacgctttcttggctgaagaatttgactcatcagcgacacgcccaacccggctgacccggaacgataatgcggtgtaatctgtagccgccggggatttaaatgaaatcacgacttcttcgccaccaaggataggcattgtgtccagaatgtcccagccttctttgatcagcacattggctgtcaatgatggtgaaacattctcttccaaacccaaatcttgatagatattgaattcttggaataatgaagtcagatcatatggcgttggggttcctccttccggtgtatgaggaaggatggccatatatttcaaatcaaacgtcgtggacggggttaaaataccgtcttgtgactctttgttctcaatcatttactcagctcctgttccagctggctgacaaacatggaaacataatcaggatcaaggacttgaattgcacgtttcgcctggtttttgttgatggcatcatcgtggtatgatatcccggtcaaaccataatttgcaatgatttgggagtcatccataccgtccagaccgtaagccatacggatagctctggcatctgtttcatgcccaaactgatctacatagtatttgatatcccacataccatccaaaccgtattgagcgatcaattcttcaacaatccgttgttctggttttggccagtcattattgatatccattatactgttaatcatacatggtatccaaaatagctcgaaggagccatagacacgctctgcaaaggaccttggggtttccccatcatagatgttatacggcaggagaagcccttcgatgtccttaatcttctgtataatcatcacacggcgcgataggttctgtaataaaacctgatcatcctgctgacaatcaattagctgatgccagacgagggggaatttctcaaagaatttcataatcgtctcctggattagaagctgtcgccttcggtatcaaagcggcctttgtgcagaggttccagttcgataaatgtcatgtcaatttgggtagacacaatgctatcatctttgtggactgcatacgacgaatccggggtttcgttgacgaacatgtttgacagaacgcatgtcgaaatccggtgcaaccatttgttgcgttcaccttgcaccatgaatgtaatatcaaatgtcgatgggtgaaggtaaaacgcgctggagttcttgttgtatttgtattcaggatacatatgcatcttgaacagacgaatgatctccctgaccattttggcttctttctgagagcgcggtgtgaatttgaaagtgaatgggatttcacggtttcgcactccctggaagatcatttccacgtatggattcgtcatagtgccggtgaacaactccagagtatcatgagcgttaatcgtcggaaggaacgggatagactctgaagccgattggatagccttcgtcgccgcaaaccgacccatttccttaccaacgttgagagcatcaccaagtttgaactggctcatatcctgggcagcgcgggaaaggaattgggcacccataccagcgagacccaactcagagccgttccagccgacgccatagttggttgtaatggattcgggcatacacaggacaatggactcgttagaacgcacgtgacgcgcccaggcatatttgctgatagatcctgacttggcaccatacacgacaggggtattacccagagggttctggataggattctgaaccgtctgtgttgcggtgctcccataagaagaaccagagatcctgttgatgttgaacagaacataatggccaagggttttgcccccggtgatatccagcggatagaccaattgtttctgggcctgtgtcaagcctttggtgttcagaactttgatcttatccagggtagacttgaaattcgccatggtcttcagcccttaattagaaatagaatgttgacactatttaggactcaattatggctatgtatcttgtataccaaataaccaatctcataaacaataaaatatatgttggtgtccacaaaggaacaccagatgatggttatatggggtctggtcgtgtcataacgagagcaatattgaaatatgggttagagaatttccgcaaagatatattgaaagtgtgtaaaacatcagaagaaatgtacgaggaagaatcccggatagttacccaagaatttatcgacagggatgacacatacaatctaacatgcggtggatatggatcatttgcacacataaattcagatccattggttagagcaaaagcttctgaaaaggcgctgaaaacactaaatctaaaaccaaaagaagaattagaaagaatttacaaatctaggggatttcctggagaacggaatttttggtttggtaagaatagatcgggaaagaacaacccaagatttggttgtacggtagaccaaactaccaaagaaaggataagagaatccaataaacgattagttgaatccggtttggttgattattctaattgtaaaggcccaacaacggtagaagggaagaatgctatatctaaagcaaattccagggaattcaaattcatagatcctgatgacaatatagtcactataatcaatcttgctaaattttgtgaagaaaacagattgagcgaaggttctatgaggcatgtacacagtggcagaaatatagctcataaaggttggaggaaagcataatggctatgtatcttcaagggaagtatgcgccaataaatccccaaaaatatgttggcgacgttaaagacattgtatttcgttcttccttggaattagtggcatttaaattctgtgatacaaatccagccattgtaaagtgggggtcagaaacttgcgtcatcccttatatttcaccagttgatggtcgaccgcatcgctattttatggatttgaaagtatggaccagatcacccaatagtgaagaactcaagatcacgttgatcgaaattaaacctaaagatcagattaaagaaccgaagaaaacgaagacaatgaaggaatcaaccttcaataattctatgcggacttatctagtcaatcaggctaaatggacagcaacccgagagcattgtgctaagatgggttggtcatttattatctggacagaagagcaccttgttcctggggaagatcctgatgtcaagaagcaatttgctctcagatctaaaatgaaaagagaaaaggaaatacaagatcggcggcgggaagagaacatcagggctctgaaagaacaaatgaaaaagaccatcaaatcgaacgaaccaaaggaacgtgatgatggtctcttgttgccttaacttatgatcagctatgcccgggagctatgcattttaatttatcgcgactgatataccaaccatccttccgggcttctttagcacattcagcatatgtctcacccccatatattttgggatacgacgtgttgtattgagaagatctgtattgagtgcagtcagcacaatcgcaataaagttccaatgaataaccagacacgatcataatcagttatccagatggtcgtaaatcacgcgacggaaatcattacccttggcacagcccttggcaacaagacgagtgccgccagtaccaatgacgctgatcgttgaaaaccgcaggacgcgcccggtgatggactggtcgacctttacggtttcaactttacccaaacggagttcatctgcatcacgacggataaaccctgttttgaagataacgcgcttgttggtgacggcaaattcagtcgtcaggttccgaatgaccgtggggatcaggaaaaataggctgataccaaaagtcggaacgaggaatacaaccacccagaaatagacccaaaatccactccaccaggtcgggcgggtaaagccaatcacgtgttcgttctggccgagcatacgatctacataacgcattttgttttccttatttgtcggggtttacgcaaaagggagttgtggtcagctcgcctttatcattaaaactgtatttcagaatggcaaattggtcaaccatacgatagacttcaatgccggcattcatcatttctacgataccagtggtgatcctgtacggttcacagtagatcactttatcgatcttgccgctggcaataatacgtttggtgcactcagggcaaggactgtgagtgacgaacataaccaggccacaccaatctgccgcatgttgaggtaaacggttcagagcattttcttcggcatgaataacaccatcagataccagctggccgtctacttctatttcgcacacattaggagcgccgggtgcggtgccattccagccaatagccaacggctgatcaacccgaggatctacgataacacatccaacctggagacggcgggcataactggttttgccatatgcctgggctgctctcatatgagcaaacatcatccttggcttaatcatggacattgacctcttttgagaacatgaagatcaaatcctcgccatcgaacttgcatgaaactgccagggatgcgacccagctatggatgatattgctgatgacggttcgcatttcgtctttcagtgtatcattcacttcgcggcccgcgaatttctcaagcgcggtggttatgacattatcggcatgaggataatgattgacataacgcatcagatatttctcacgcagaacgattttgtccgtaaggtcagacaactccgcagcttcttctgaataaaggcgttctttggccttcaattctaacacacgttcatacaactcttttagcggcatcataatggcatctcctaatgaattaaggagagtatatactctcctttttcaatacgctttcaaatttagttcaggcagatttctcgccccagcgcagtcaggcgatagaattggatcactttcccacgagcatagcggtaattgccgtcaggggcgtcatgaccgccatcatgggttacagtaaaccaaggctcaatcaaccctttcttgagcagagactccccggtttgggtatcccaaggatcacccaggacgttggtcagatgccggctcggggtaaaattccaaacgcggacacccttttcgttcttccaggacttgacacagcgtttttcatgacggccatgacgagtgaggcgaacgccgtcctcaaaattacgcatacccagcatataattcaattgatgagccgtatagcgaggccacttttgagttttcacaacagtatctttcgctttcataatattcccgctctttcaaggatgatttcaacttcaccccaatccacgaaggggcgcttagacattgggtcataactcagaggacaaccaagagcggcatcgtcaatatacaattgcgcatatgcttttggtgaatctgtccattcatgctgtgccggattcttgttgataccatacagcgggatatcaaatgactggaaccaatcaaccgcttcttcaagttgtttcccgctgcgcatggtgaacagaatcagaagatgatttttatccaccagcttttttagaacctctacagcaccaatatggcgtccgatgagaggatattcatgggtaacacatgtcccatcaaaatcgataccgattatcatgatttatctcttagattatggattagcttcaataatacgtcatttcgtatatagaaaagccccttacggggcttcatctttatcagatttataaacttcccatcggcctattccacgccattcaccaagatcgttccaggtgcgagttcctacccagccaccaacttcataataatggcatatgcatgcccagaagtctttgaaagttactttccgagttggtttcacacatgcgatttgccagcgggttaagctgattgcctggaacaatggatggatataattgctatagatcaaatataacgcgatgagcgcaatgcatcccacaaataacataccgatagcagtgaaaacaaacattattccacctttaatcccatcagatcttccatggttttctggatgcggagccaatccagcgcagcatcataacgaggatcatggtataccatgccttccagttcccatgccttgatgccggcatagcgatccatctggccaacacctttcagccagctgacgatatcaaatgtgtggtgataatcccacggctcattggagtattgcccgcaggtcacttcaatgatatgctgggctttacgcagatcgaatagatttcgatcacaccagtcaaccgatctgggatcaacccccaggcgatgacatcctttgcgaatttcgtcggccagctgatagatggagatatcgtcttcctttggatacaggctgacttcacgggcggcatcacatggattatatttcccgtttcccagccaccagtctacagtcactttctctttgacacgaccgaggtcgatttgctctttgacattcaatttaatgaatgtggtacgttcttcgactagttgctggagagtataacgtttggtcaaatcagctactgtctgcgcccaggataacataacagcatcatcccagcggcccagggtttcactatcggcgaccgccaaaatatttgatttatacattgttaccctccacccggataatttcttcttcagaatcgacgacgttgatgtcatcatccagcgcgttcagattttccatgtcttccgcaaacttgtctacttccatgatgtagaacacggggacaacccggcggcgagtgtcttcatacagggtttctgccagtgcttctacctggcggacaacgtcatacagattaagaccgccaataccgcagccgatagctggcaggccgatatagaccgtttcagaatccttcgcttccataatctcgtgaagttgttcaaacatcacttgtacagaactgataacggaaggcatacgagcatttgggcctgtatagaattgagtatacaggttgaatccccaaacacccgtgtcacggtcaaaggcataagacatgccaccgagacgctgctccggcccgcgctcatcgttctggtctgcgcgccagacgtcaggaaaccccagccgaacgaaattggcgatacccgcgcccatcaccgaccagcaattggcgccatgggcgaatccgttaataagattgaaacttttcgcggcttccaacaaattcccaccacgaacgatatacgttgtcatacaattcttctccaggtaatgttgatgtcatcaataaattcaaggcaaaaaacgccgccatgtccttcactattgttgatggacatgatagatgttctctcgtcggtggcgataagattaaccccaaaccctttggacatcaaacggaaagcgatttcttttgcgatccgattgagatacgcaggggtggttgccggatcaaaatatttttcgaactcaggcatcaccaattccccttcacgttttcatcgatttcttctgggtttaattcatatgatttcaagcgacgtgaaatatcccgaaatcgcgcgatatcaccgggttcaaatttggccatggtcatttaccagttatgggattaggcggtaataataccgcctttttattcaataaaggtcttcggagaaaagctgtttgaaaggggtattcttcagacgaacttggttgacttgcccggcttctttagcgacgatcgctgcctcctcgcgagttaagaaattgccttggttgtcgatgaaaccctgttcacggctatgggttgtggtaatgaccccagcttcttttagaattcttaactgggaattcatcaataggctgtggtgacgatcagcaaccacgatcacgtcaccatatttgttggctgcggccacgacacggcgctgccattccccttccttgggtaggtcacgagcgtacagggcaaccattgtatcatccggggttcctttgacctcagagaacaatcgtccagtgccaccagggagttcacggaaataaccaagtagtttcataatctattcaatccatatttcaggttcaggaatatcgaccatatccacagtctgatttttcagatcgtgaaaacagtcgccaagaaattgtattttgccgtttgtcaagaacaaatgacagcgtgagccggggcgatctttaaacaccaatagacttggagtgaaagtgggtgcaacaacatcgttgttccacgcccagatcgggccttgttctggagaacccttcacgcgatatgggtgaagcatattacaaccgggacattgaaaatataaagaatcacccatagacaataattttgaactcaggaatctgctcatcagctgtccatctcctcatatggattgtaagggcgcaattccccgataagtttaggcaacaaggcgaagccgaacagattgaaggaacgcatagtgcctaccatgacaacatcatcgtcttcgtcagtgatatctttcaaagaacatatggggacataggcatcgaagtcttctccttccccttcttctacaagggcgaatgcgacttcttctgatatgaagcgagggatgcatatgtcaagcacccaggcaaggaatacaagaacggaaatgctgcggaaatagaacatattaaagccctcgcaggtggcgggggccaaaagccccctgtattatagatcgagcagagtttccaactcgtctagatcttcgttgtaaagatctatgtcctgtttcttatttaactcgtcccgttgaatttccagattcttgatctggttcaacaggcgctcgcgggcgtccaatgtaatcgaggatagagacatcttgaacaaatcgtcaagatcaccatcaaagtccgggtagtctgtctgaaatagtgctttcaattcagtcaaactgcgacgcatatctgtcacaactgcccaaccaataaacagagcacgattgttcattttgtggatacgggagttgaggtcagccaacagatattggcgacgatcttcataccgttccagccgatagttgaagaatgcatacagcatatctttccaaccattgaaacgttggataataccgcattcgttccaggatgtccaggtcggcatttcagctgagtacagccggaacatctgttcaactttggcgtcatccagtttagacaattcaccacgtttgaacacaacagtgatatcccaaccatcttctgtggaatcgttggaatactccgtgagaatccctgatttatacagcggaagaataatcttggtttcataatccttggcgaaccagcccaccgggacttcagttatgcgtagggtagtggcattgatacgttcatacacaccgcgacagtacactcggccttcctcagtgtatcctgtctcccccttgtaaccattccaatacggtttcaagtcatttgggtcttcgccacggagaagcgctctcagggcatccagaacagactttatgctatggcatggggttttggtagcatagccgctaccgataccgttcataccattcacgaggaacattgggatgaccggcaggaaaaactttggttccagcctttcctcaccaagataattgtattccaggatgccttcatcttctttccgatagatcttacgaatcacaccggatactgccacagaaatatatcgcggtgatgacgcttctttacccatgattgagccgaactgaccatcacgatcaaaatacggaatattgttcgtccctgggaaagcctgtgccatattgacgatagtgttgctcatgttctcaccaccagatttgtaattggtacgggcggcggaaaacatacccaggcggtcaacaatctcttccttaccgtattccaacgcagcgaacaaaatttttcgctggctgggcttgaggctgtcaattaacagaggaatttggcgaacgctgttaacaaccgaaaattccttatgatcggtgttaacaaatgatgtcacagtaatgcttttggcaaccatcttattcatcctctgtttcaaataagcaaacgtcactaaaccaggtcttgcggtaatccgacgccttatcaccgaacccatcattcaatgaattcttgtaggcatcatccagaacgaccgtcgtagtatacgcatccagattgtttagaatacgtttgaaatcttcggtgctgttaccgcccagaccttttagatatttcttctttgtgatctttttagattctggggtcttcatgaactcttcatattcggcgttgttcatgaactcatgcatttctttaccgcaccacacacgcatgtacggggagcgcagaagtttaagacgcccctggcggacatattccggccagaacgtacagtacatggtaatcaacaggccacggatatgaatgccatcatcgtccgcgtccgtagcgacaaccgtgcaaggataacggctggtgtcaatcggttgccccggtactgcgccgccgtggatagtacacaggttcttgaattcttcgttggccatgaccttggcgcgcgaagcgttcaaacagttgatgaatttaccacgcagaggaaacagaccgattttcttggtgtcacgggcattgaggatagggttagacgcgctatcaccctcggtcaacaccagtacgcagcctgaacgatcaccacgggccgtcgcgggataatacttttcaatttcacgataatcccgtttggtgatttcctttttggccttttcaaactcggcatcatcctgatcattacgcagagccgccagttccttacccaacccgatggtaacatattccagcgccttacgaatcaagcgatcagacggtttgtatgttgtcccaaactgactgacaggtgtggtcatgcgctctttagtctgactatcaaaccgggggttatcaatgtcagcagatatgaaaagcatcatatggttcttgatcatcgctggcttcaattctgtcttgaattttttagacagcggagtacgaatcgcagcaacgatctggtcggcaacatagtcaacatgcgggccgccgacgtgagtagcgatactattgacatatgacgcatgcatgaacgtgccattggacggcgcgatagcaacagaccaatcccctgattcgtctacagatgaaccctggcagaagtaatccacgaaatgaccaaagcgatcaatccggataggcttgccattgaggacgatcttcagacgagggttacacgccgctacttcaaatgcccggcggtagatcatcagcagattattgttatccagacctttgatacccaaacgttcataatccggaatccaggcgatggtcgtacccggcgcgttcagattactgatcgtcggcactgaacgtttgctcatattgttctcaaacgtctggagataagacttcttgccgtcgttggtagatacccggaaccattttgagaacacgtttacgagagaagcgccttcgccgttctggccaccggatttcttgttgttgtactcttcgtcatcatcgttgaagttactaccagcatacagggagccgaagagcatctccgggagccattctttggtctcaccgtgttttaccacagggatgccgccgttgtcagcaacgatgatctggccgttcatcgccattaccgtaacagtgatctcgttgaggcgtttcccctcaggagttttgctatggtcaacgcagttcgtgataatctcatcgaactgtttgatcagcgccggggaataggtaaagttgtctttgaatacaacctgatcttttaccgggtcataaacccaaaccgtcccggatgttgaacggatactacccagatggcgttctgggcgaagaaggatatgctctacatgggagagcttcttgtactttctttcaatgttaacgttactggtcatcttcctatcccgtcaatgtaaacacacaagattatgtatgggattggcttatagaccaaatttgccccgccacttttcgactttgtgctcaatagcatgttccaccttgacaattgtgctgacatggttttgattgcagtcgcacgcaaattttgatgtatgcttgataatgctgttaatcagatcgaccattcgatcatttgaacgctggggctgattcagaagtcgagtgattcttcctttgaaatggttaatcatcgccagttgtttatcaacggggtcaacacccccgcaaaaccaataatcttctaacgtgtgctcagacaaatcacttgtgtgattagcctgggccaatgcatagatgatagaatcaaatatttcgtccttggtcatggaaccatattgctggacgtgttgatattcagtcacatacagcaaatccagcgctgatatgatgacgtctgctacttcgccattcaaaggctcagacgcggcgataccatagaacacgtctgataattcacacgtttcttctacaagtttactgaatacaaatactgaagaacgagaggggttcatcgtagtgcaatcatacgatgtgtttaaaatattacgcagaaatttcatttcaaatatccttctagacggaagcggttaatatgctgtatgataaagtccatagagttttgaaaactatattttccctggtgttcatatgcatgtatcaggggaaggcggctgtgggctaattggaaacgcagcttgggcggcatcgtcagcaatttttggcttgttgctgcaatgatgtcgtgtttaaatttggggtcatcaggagacagaacgacaatctgcgacttggccagagtctgaccgaattgtttggcatcatttccataaaggctacgcaggtcatcgtgccgatatttgagccaataccagtaaccttccatcgagttgaaaacaccatcgacagtatccatgggatggtatgcaaaatgagacaggaatctccccagctcggtgcggctccgactgtaaatgttgtaatgtgtcttgccttcatcatccggcgtcatacgatcttttggaacattgagtaataggaacatgatataggattctcaaatcaatatattgctgtgtgtagcagatttataatttcctggatgcgatcaagaaactgacgacagatacagcaccaaacagcccagataatataaatctgaccaaagggaagtcaggggccgcaacaagactaactgcgttttccaggcatatcatgaatgatataccacaaatcattcccagggcgaactgattcggtttatgacgtaaacgtaccatttcacacctcctctggttgattaatagggtccaaagcccctattatctagccgagaaagacaaccattcttagagtaaacaaattggcgtttctataaataagataataggtaactggtggattataccccgagtaacacataaagaaaaagaggccgaagcctcttttattcatcatacttgcctgtcctgaaattccatttcttggctttgctgaagtcaatatccttgaagatattcccgaagagtttcttgaactctgattcctcttcaagatccttcggtttcttcacgggttccttgaccataccgccttcgggtttccccacatcggcggtcgtggtggcaggaggagaagaatcttcaaggaaatccttgaaggtcttcatattagactacagccatttcacaacgggtagaagtcactgaatggccatcggcgtcagaaacaacacaccaatattcgccttcgtcggcagcatccacagcagtcacaaccaggttagcggttgatgcagtcgcgttggtgccagcgtcaataaccgaacctgcgccacctggcacatcagagaaataccacgcataagtgtacggggtagtgccgcccgcagcgacaacgctaaatgtcgcgtcttcaccgctggtgacgtctttagttgccgtcagatcggttgaaagagacaaagcgcccgcaacggtgatgacggttgaatcgacatggttgccttctacggtgacgccatagacggtaacggaaccggactgaagcagtttgaatttaccgccgccgatatggaccgctttagtcacgtcaccggaataccagttgacgcctttataggtcgcattcgccggggccaccgtcgccagaagttcaaccacctgtccaatttcaccattggcggttgccggggtgatagtcagaccagtagtcaggactgcgctgggatcatgaatttcgtaagataccaggaagccgacgggcttcgaaggatcgattttggtcacgccgtctgcttccagattagatttggtcagcagtgcatcaagacctttacattcggtcagaatttcgttcgggtcttggttcagactggttttctgccagcccttggcaaccccggtaacaacatgaccacgttcggtctccggtttgttgcgtacaacatacggcgcgactaatacattgattgttggcatggtttcctccactcatccaaatcgttgttcagagccatcatcagctcgttatctggttcataagaaccggaacataaatcatctctccatacacctaacgtcaacaacgctgctttcagacgaggatgttgggacttgtcagttttcaacaccaacattcggcataccgcctcagtctcaaatgtgttgaaaagcgtaatcaattgattgataaggactcggggacttttcccggggacaaatcgtttcaatgattgattaattagcgaaattcgctgaatgtccaccatcaaatcatctcttgagacacaaggagtaatataatgcctcagagcgtattccattaaattgctttcatcaacaataggcatatagaataagttcagctgttgtacactggacttatttaatctgaagtttttcgatcaatttggcgatcagtttgtcccggtctgtttctacaatccccagaggctcacccaatactgacagatcgttgatatccagaagattgagggtttctactgtaatatcagtgctgatgaccgtgcccggttctatcggtcggccgaatttgtcacgaccataacgtttgagggtactggcaagcccggttagctcctccagaagctccttatcgccgtttttatgctcacacacccaaccgtagtcgccagcatataccgtggcgccgtcgccaacgttcgggatgttatccaggatgcgctgcaggtatgatggaattttctgttcttctactgcggtgattggatcaacaacagcagtatctttaactttcggtgtcttggccatgttcagttctcctatagactttgatatatttaccacagcaattgcattggtattcatgcatacaacgcccgtcgtcattaaagtcacatgccccacaacgacagaataattttacgaattggctcccttcaatattcctgaccgggaaatgtttgtatgaatattctcgcatttcaccgtcaaattgaaaagaatctattaaaaacttttcagtcgttctataaggcccaaatgtctggcgagcatatttgaaataaacatctctggtttccatgaattaactccaacaaaaaggggccgaagccccttattttacgctgtcgtga

SEQ ID NO: 38 - DNA, 164874 bp, unidentified
  source 1..164874: mol_type = genomic DNA
atgctcttctcattttttagtccgatagattattctgcaaagaccgtaaaaggtgctaaggcaaaagctatcccaaccgctgacatatttcgtaattatcgcaaatatttcgacactgtagcagaaaactatcttttacaaacatattacataagtggagctcctagaccagaagaattagcacatattctttatggaaatagccagctgtactggattcttttaatgtgtaataatgtatatgacccattcagagattggattaaaacacaagacgcatgctatcaatttgcacagcaaaaatatgcagatgtaggtggagaccaaatactctatcacgtggatgcgtatggcaatcgctattacaatctcgagcaatatcctgaaaattcaggtgtttggtatgataaaggggactttaatcatcagtatcctcaatatactggtgctttggctggtgttgacatttacgaagattctattatagaaaatgaaaaactgcgccaaataaacattatcaatcctagtgatattgaggcatttctttctgatattatacgagaaatggaaaaagcacctgacagcgaatacgaatcaggccggtacaaatcccagactaccatcggagaagttttatgattgaaatgaacgattcattaaaatggtttactggtgttgttgaagacagacaagacccattaaagcaaggaagagtgcgagtacgcgtttacgggcttcatccgtttgaaaaggtgcaaggagctataaccggtcttcctactgaagaccttccctggatgtcagtgattcagcctacaaactcagctggaatttccggagttggctcgtctataactggaatggtggaaggaacatcggtatttggcttatggcttgatgaattcaaaacagcaggattagtaataggaacatattctgcgcacagaaaaactaagccaaactacacggaaggtttttctgatcccacaggtcaatatcctagacaggttgggtcagatactaacccgctagttcaaggcgatgaaaccgggtatagtgctataccaaatatcattcaagatagaaacttggatattggtattaatcctgacgatgctgacctaagtgacattcctgaagacccaaatcctgcaattacaataacagatatgcttaatagggacgaaggtcttagattaaaggtttactgggacacggaaggatatcctactgtaggtattggacaccttatcatggcacaaaaagtacgtgatatgtctgtcatcaataaaacattatcaaatcaggttggtcgtaccgttacaggaaatcctggtatcattacaatggacgaagcagtcgcgttatttaaacaagaccgcgataaaatgctttctgacattaaaacaaattcacgggtaggacctgtatatgctaaagtcaacaagtcaaggcagatggctttagaaaatatgagctttcaaatgggtgtaggcggtttagcaaaatttggtaaaatgcttgatgccatgctcattggtgattggaaaaccgcttatacagaagcaagaaactctgtttggtttaatcagacaaaaggtcgtgcttctcgtgtttccatgattattctaacgggtaatatggaatcatatggagttcctgctccaaagccagaaggaaaaaacctgtctgctgcttacgtagaaccaaagtctggaggtaatcctgaagacccatggactccggaagattcaagaattctttttaaagagcccgaatcttcatataatggtcagtatccatatgttcacacaatggaaacagaatcaggccatatccaagagtttgatgatacacctggctatgaacgctatcgtattgttcacccaacaggttcatacgaagaagtagctcccgatggacgccgtaccagaaaaactgtagctgatttatatgacatgactcagggtgatggaaatattttaatctctggggataagaaggttaacgttggagggaacgagacctattataacatgtataatcgtcgacagcaaattgatggcgataacacgctttacgtacgtggaaatgaaactaaaacgattgaaggcaatggtactatttttgtcaagggtaacattaagatagtcgttgaaggaaatgctgatatccaagtcaacggtgatgccactactaaagtagatggcaaccacgacgtaaccgtcggtggtaacttaacttggcaagtagcaggtactgtaaattggaatgttggtggggcttggactgaaacaatggcttctatgagctcaatcgcccaaggtcaatacactgttgatggttcacgaattgatgtaggttaatcatggctgatatacttcctattaataccacgttacgcgaagtaatagaaggtgaatacgttgagcagtactttactgctcaattatctgccaacgaaacattaaaatcaataaatattatcgactatcaaccagtatctgatatctctgtgtctgaaacctattataaaggtaattataactcagtttttacttttggaaacgatgtgcttaaataccgtgaaggcgatgagctaaagtccgcttcagcgtgggaggatttacctaatcccaaaaccgctgatttatatctgtggaaagcccccagaacactagagaagacatttacctatacagttgagataatatatacagtgacagaagaatcgtctggaggttcatccggaggttctagcgctccaatcgtaacagaatataaaaagcaaaaggtttactctcaaaccgttaaaggtaactggagcagatggggcgaccaacttcgtgcttacgtatatgcggggaattaaatggctggtctttcatatgataaatgcgtaactgccgggcatagtgcgtatcctccgacagaagtaaatgctacacaaagtaaagtattcactggtggaatagcggtattagttgatggcgactcaattaccccacacaccaagacggttgaccctcatgatacgcatggaggagttgttcaacctcgcacatccaaggtatttgtaacaggcaaaaaagctgttcaaatggccgatccaatttcttgtggcgacactgtcgcgcaatcaagctcaaaggtattcatacactaatggctattaaagaacctttaaattatcagttaacgcgtactgcaaacgctatcccagacgcatttactggagcaacattcgacgaaattaaaaatcagcttattaactggcttagtggtcaaaaagagtttcaagactttgattttgctggttcgcgtttaaacgtgctattagacttattagcatataacacgctttacatacagcaatttagtaatactgctttatacgaaagctttattggaacagctaacttgagaagttccgttgttcaagcagctcagcaaaacgggtatttgccaagttccaaatcagcggctactgcatctattatgcttgaggtaactcatccaaatccagagccagcaataaaaatacctcgtggaaccaagtttttagcatatgcacgagattcatcagtagacccatacaactttgttgttactgaaaatgttattgcgctaagagatacttcagcaccagaaggggttaatagatatcttcctattgtcaatttggcgcagggacgtattattcgtactcagttgtcatatgacccgaagaaacctattgttattcgcgaccaatcaattgaccgcaagcaggttaagctgtgggtggatggcgctgaatggactaactggacagaccgttcgatggttcatgcttcgtctatttcaacgatttattatatgcgtgaaaccgtcgatggaaatacagaattcttctttggtgaaggtgtggcagaagcatctgtggcaggaggagttcttgaaagcaacttcatcggcggattgaagcctactaagggtgcgcaagtcgttattgaatatattcgtactgatggtgaagctgcgaatggtgcgactgatttcagctatgctgataccctgcaatatatcgtagtaaacaaaatcattgaaaactggtcagattctcctgattatgttggtgctgatggtggtggggaacctgaagacatcgagcgtattcgtgagctcgcccagattaagcgcgaatctcaaatgcgttgcgtgtctaaaactgactatgaatcattcgttagttcacgctttggttctatcgtgcaggcagtgcagtgttttactgatcaggacaaacccggatatgcatttatcgcaattaaaccaaaatctgggttgcagttaactgcggttcaacgagaagacattcaggattatctaaaacctttctgtcttgctccgattactccttcggtaatgagtccagactacttgttcatccgtcacaatattaaagcttcttatgcattgaataagttgcaagaatcagagcagtggttacagtcaaaaattatagactcgattaatagatattatgttgatgaagttgaaatgtttaacaaaaatttcagtaaatctaaattattgacctatattgatgatactgaccattcaatcatcggttcttctgttgatattcagatggttcgtgaaattgtcaactatttcactcttcctagcgcaggtattaaatactataatactattactccgcggacgttacgttctggtgatttggtctttactgtcactccaaccgcagattcatatccagttaatatcgttggaactgacccagataaaaatggtaaaggaaatatggtcattggaccatttaaaccaggtgatattaaagagaatactcatattcagccatatactgaaaacgattttgatagaactaccgtcggcgaaagaactcgttggtacaaaatcggtgaagtagattattatggtgataatatttactggagccttggagctattggagccgatcctcttcagtttgaagaccaaagtattgagctttattctactcctacccaggatatcgtcttcgcccgcgatggaacacttatcgtatttgagaatgaccttcgtcctcaatacacaactattaaattggagcctattactcaatgacaattgcaccgttcgtcaccagcttacgaattcataagctatctgcgaatcaggtcaatattcgttgggatgacgttggtgcaaacttctactattttgtagaactggccgaaactcgaaacagagcgggggaagttatccccgctgataacttgagttggtcttcactgggttataccgcggataatgattggttcgagcaaaatcgtattaaaccgcttacttattataaaatgcgtgttcaaactacgtcagcaggatttgaaccgtctgaatgggttgaaacagaagagttccaaacttttgaagaaaacgcatacacatttgagcatatgcaagaattcagtttagtgaaagaattcattaaacagaagttttctttaaacaacatgtcgtatgttaacttcaacacatctgccatgatggcatctttgatgactgagtcttttcagtttagtcctgaatattctcatttatcagctattgaaaacttcgttgtaggtgaatctggatatcatgaaattcagggacctattgaagcagtgtgtgttgataaaaatagaactatgctgggagaaatagacggaattttgtatctgtttgaaagattccaacatatggttaaagtatcaaatgataaaggacagaattggcaatacgttcagttatttaatgaccgcgtcggaaatccggtttctagagtggtaatttatcaatctaaaactacttcttatgttttaggatatgataaaatcttttacggaaggaaatcatctgacgtacgttggtcatcgaatgaagttaagtttagcgataacgaagttacatttgctaaattgggagaccagttaaagcttggctttgaagtagagttattcggaacgtatgcatcattgcctgctgacgttaccaaatatgcggaagcatttacttgtaatgacgactatttgtatgttgttgcaaaagacactgtccgtaaagttaaattaaaagatgctccaatagatactgaccctttaagtcctacatttggtgaaaaggtgtttgaaaaggaagtatctcatataacaggcaatcctaaatcagtatgctttaaaatggattccgttggaggcaaaatctttgcccttattaccggggaagttaaaaccttaggattagacccaacagacccaagtaacgttgtggattctgcaactaaaggcgtctatgtttaccaggaaggtacaaatacttggaagcgtgtatttggtaataccgatgaagaaaaacgtcgtatagagcatttatggacttctatgtcaactgacggaaaggaaatattcttttcatcagctaattttaagacaacagagtacacccaggatattgaacttgagacgaaatatccagaactaatttctaccgcagtaaaaaatgttagcccaattcaatatcactctgataagcattaccacatgatgagtttcagagcagatgaattttcaagatgggaaacatttgttcctggacctatgaggttttatgctgaaccgtggtttgtctggatggctcgtgaaggcaacagatgctggataagtacagctgaccatgcagttgtcatttataatgatattctttatcaaaaaagagtagatgcagcggcgcagggaactaccgagcgtattctatcggaagtgtgggataaaggtgacgcaacgttttattgccctccagtttcatttaatggatttttgcagtatgcttctggcatcatgtttcacgaaccagacggaaaactgataggctattacgcatttgactaccgtgttcgtgaccaggtaacgcttaactggaaaccaactgatgtaatgtttaaggcgtttctgcagaaccaaacacgggaagaagactggacacctgaacatactccaggcttacgtgacccagatttgcgtccgtatcttactaaaatgatgccggatagttacttgctacaagatagtaattttgagcacttttgtaagtactatctccaattcctttcggatggaaatggaacacattacaacagtctcgttaatcttgttaagaacaaatatcctcgcgaagaaaatgcatgggaatatctgtggtcagaagtttataaacgcaacatttatctgagtaaagacgctcgtgacgctgtcgtccgtttctttgaagcacgcaagaatgatttctatgctaccaaaggaattgaggactcatataagttcctgtttaaacttctttataacgaagatgtcgaaatcgatattgagtcaaagaacactaccgaatatgacattattgttgaaagcacaaatatttctgatgatttagttggtcgtacgatttatactgcttccggtcgtagtaatgtgacttatattgagagagaataccgggatggtcgtctgttatggcgtattactattcataacttatcaggacggttcattgaaggccaggaaattaaatcagagcgtacggactttgagggtattatagttcaaggtgtccgtggaaaggatatgctgagtaataacattgattatataaaccgcagccgttcttactatgttatgaaaattaagtctcagcttcctacttctcgtttccgcgacgatgtattaaggtttgttcatccggtaggtttcggtttcattggtataacattgctgacgatgtttatcaatagtggcttaaatatgaagcatgttgagactatcataaataaactcaagaactataaatgggatgcaggactgccatcagtttatcctgatagagttgctattatcgcttcagatgatacaatagaaagagacccaataactaatgagcctaggtattcttcacgtgctcaagctggtgaacctttcccgttacctgctaactataatcaagaaaataataacagcattattgctggacaaaacccaggacaacgacgtaagccgttgagccctacatttgaccaatcagcagtaacgtttgctaattatcgcgatttagttaaccaacgtcttaaagacgatgcaggtaatcctcgcgatcctgaaaatccgacacaggtaaaaattgatgagtaattcaacaagagcaagttcaacgcgtagcacgatttatcgtgctatcattacatctaagtttagaactgaaaagatgtacacattttataaatcaattggtccgggaacggaccaaaacacattgtatgtttcatttggaaaaagcactccgtggtcagataatgaatctgaacctggatttgcacctccatatcccgctgataatggagatggggtagttgatgtttggacaaatatgatgggggcagtcaaaattgaatcatctatgcttgactgtgttgttccaagaagagactggggcgatacaagatatcctaacccgcgtacatttttaattggcgatatcgttgttgctaactctgcgccatataacagaactgatgctggatttggatggatggtatatagatgtattgatgttccaaaagatggaatgtgttcaattggtaatcttacaagcaaagacgaatgtattaagcttgggggtaaatggacaccatccactatttccggttcagcgcctcgtgggcgtggtgatgcaaatggtaccgtcgatttgggcgatggatatctttgggaatatctatatgaaattccagccgacgtatcaattaacagatgtacaaatgaatatatcgtagttccttggccagaagagattgaagaatctccagctcgttggggatttcaaaacaacttaacttggcaacaaaacgactttaacctaatctatcgtatgaagtgtaatacaattagatttaaagcataccttgatgcaatttattttccggagtttagtcttccaggaaatactgggtttagacagttgtcaattataactaatccgcttgaagttaagccaatgccaaattctcctaacgttaaggctgaaaaaggttggtatagcgcttctggtcttgaaagacagtcaggtgaaatgatttacatggaaaatcggcaacctattatacgttcaatggaccaaacagaagagttaaatttaattttcgagttttaattatggggagcctttggctccccatttttatataaataagactatactttgatatgaggttaacctatgtatacagataagggtaaaaaaataattgacgtcggtgagattggtaatgcttctaccggcgacattctgtatgatggcggtgtgaaaattaatgataacttcgacgccatttacaacgccttcgccgaccaacgattatttgcagctggcggcggagcattgaaccaaaaaattcatgcaacaagctattaccaaaagataaaatttggagatgctaactctgccgggacagttccaatggggtcatgcatagatgctgattgttcagaaggtgcagttcaaatacgtctttcaaaaggtaaagcgggagaagctgtattcgttgtaaatagtaatggctcagcatcaaaatctaaatccataaaaataacaacaaatggcgaaggtgtagctgatgcatttaaagacggatcgcgagaattgattatcaacacaccaagatgtagaattgagctatggtgtattgaagtcaaagctaacggtgctgcagtttgggattattcaatttcaagtatgtttggcagcacatattcgccgttagaagctacatataatttaacgagttctcctattaatattcgacttggatataatgatgattactctactgttaaattgctattaagcttcagcgcaaatccaggtggtcaaaccatcaaaaggcaatcatctgaagtcatgcttatgattgacccgactattacttcatcagcgccaaacggaagagtatttgacactgaatatgcagtgttaagaagtggtgaatcatctgaaaatgaaaagatgtattctatttcatactctattaacgcgcagaaagatttaatatgcacagcttcaacatcttatggaaacgcacgtttggcagttaaagttattgctacacagaccgtaggggtatctcaataatgaaacaaaatttgatagtaggccaatcagtagatgatgggtctggtgattacctccgtaaaggtggtcttaaaattaataacaactttgatgatttatattcagagttaggtgatggttcagttccattcgcagcaggtgcatggaaaacttttaaagctagccctactggaactactttaaatgctaagtttggtcaggcctttgctattaatacccaggcagcaagagttaacgttcagcttccaaagggtacagccaacgactataacaaagttattaaacttcgtgatgtttggtcaacctggcgattaagcccaatcacagttattcctgctcaaggcgatacattaaaaggttcagcttctcctaaaattttcaatactaacttccaagatttggaattggtttattgcgcccctggccgctgggaatatattgaaaataaaactgtagataagctaactaatggcaacttaagtactgtagcgaaaaaatcaattattgctactgcgggtcagactgactttcttaacatttttgatggcgtagattataacgaagactcgcttaatgtatatcgtcgtggtaatattttatattacggtgaaaccagcgttatggataaagccaatgctgattacggttctcctggaacggtagcgggtaaattggtagaattaaacggtaaagacattcgtttaaaagttccatgcgttgaaggggaagtaataacatttgaaaccttcctagatggaattggtgtttatcggtcttcatacaacaagttggctatccagatacgagattcagcccagactacatccaagacgattcctgggtcaatgatagtagataaccttgctactctccgcagaatcactctggatgacatgggtgtacttccaggcgtaggggtaaatcctaactcgcttgaaatttcattgaacggaaaggaattactcgaagctggaactgctggtcttcctttattttattgtgaaggtgcggaaggtggatacgcagaagactgtataaacaatggtggtcaatgggtaaattctaaccaagattatagactggaatttgactcaactggtactaatgtcgaagctattatttttggtgaggcgtttgaagataaagaccttcttaccgttcgttggttcaataataacatcggtactactatggatattgacgatatcatggcagaaaccgaccaagtgtatatgaatgctgagcaattagtaactctaaaaaatcgcattgaatacactaactatgatgaaccaaatcagaaaaatatgcgtcctgtcgctgatgatgttatgattaaagtcaataacattgcagcattctttgacgtaatttatccgattggcactatctacgaaaacgcccataaccacgcaaaccctgctgactatatgggatttggggtgtggaagctttactctcagggtcgtgttactgcgggttggaataatgattcatctgatccttattttgcgcggaacaataataacctaaatgaaaatggtcagccatcattaacagcaggtggaacggttggtgatttgacatttacattaggaaaagaacacattcctgaactaatgtcaagagacaaagttctaatttcagaccctgaacatggcagcgtagttatcggtggatgtcaattagacccagacgcacaaggtccaggttattctaaataccgtgaagacactgttgcagtaaacaatggtgtagttccaaatgacatcactaaaattcagccaacaatcaccgtttatcgttggattagggtaggttaaaatgactattgaaactaaaactcgtgaaggagctaaagttaattcaagattaactgctttttcagaatatcgtgtagacccgcagaatatcgcggttggaaataaggctcctatagggagcctaacctttgagcaaatggatttaggtgtttggtacccaaatgcagaagctgctattaatgatttaatgtcattacagtcagcagaaattggaactattgtttgtaatgacaccggaatatctccacaaccagcacagcaaattacacgcgctactttttcaggtgtagtttcgttagaacctaaagaagacggttctgttggtgacccagtaataattcatattctcggattgccgattagaattgcgaacggtgatgacttcgcagctgtagcaacacgttggtatgataaagtaaaagaattagaagctgttggaaaggtggttcaacaggttactcaatcgccggcaactcctcagtatgttgatattattcatctagattatcagaaccataattttgaaacatataaaaagtatggtttaactgttgaatttactattacttcacctgctaaagcgggttatgggcaatgggatgctatcggcaacgaatctaaaaccttcggcgcgaacacatttactttccactattttagaaggatgggataatggcccagaataactataatcactacagtgatttggccaaatatacgatatttgacccaacaaatacacaatggcctgttgctataaaagacgtccaatcagcgttagagctgattggtagctgggcaagaactgataccggattacctgtagcatctcctacagtagccggtgtaattcgcacagcaacacaggctgaagttgatgctggaactattggtaatgctgcggtaactcctgctacattaaaatccacaattactcggcctgaagcaactaccgcaattcttggcttaacccgatacgcaactaatactgaagccgcagcattaaccgcaggaaatagaactattaccgcggcggctctcggtcatgtgtttaaaactgtgaaagcccaagaaaacgtagatggaactgttaggttaactactgcggctcaagcacaagcaggaactgatgaaaccactgcagtaactcctaagcgtgttgtagaaatgattggaaagttcagcgttaatcctcctacttatacttctgcaacagaaagcaacttaggactagttcgtgtcgcaacccaagcccaggtagcagcaggtgctgttcacgatggatacgcagtaactccaaaaaccttcatggcatcaaaagcgtctgacagtgtatttggtatagtaaaatttgctaaagactcagatgtggcttcagctacttctaacaatttggctgttactccaaaaagtcttcaagcgctaaaatccaccaaggataaatatggattaaccagattatcaggttctccaactactgatgcttcattggcagctgctgcaacagatgctgtttttaaaactcgtagaataaacggaaaaactcttgataatgacataacaattactaataatgatattaattgttatacaagacaagaatccgacgggcgctacatgccagctggaactagagtaggtaatgttacctgggttgaaggacaatcttggattagccgaggtgcaacgtttacatgtaatgcaccatgggaagcttctagtaaattagctctaaatgttaacgtaaaatttgagcgtaacaacgacggatatgacaatcgtattttcagatttgttttaatagttaatggttcccaatggggtggtgaacttactcttaacattgaaaatactaaaggcggaaaaaatggtcattcatggagatttgaagcttacgcatctagcaactttttcttcaataacattcctccaaatgccactgttcaaataagaccaacagaagacagtcgtattatattttatgactgcatgcttacattctgtacaaatagaccgtaaggaataatatgaccaaactagtagattcgcttccgttcgtagacggaattccagacgattttcaacagagaattaactggataaaaaatacagagcctcttaatggggcttcaacccgctatggaaatgatggagaactgaatagagcttctgtgcagattcagaaaaacgttgttcaggtacatagtgacttgaatcgtgttggagctgtagtagaaaatgttcaagtagatgtagaccaaatcaaaaaatcgttagaaatcacaggttcttctgatgccattgagcaggtttatatcaataaaaagaatattgaaaagcatgatggacaaattcttaaattagaagaagacaccacaaagattagaactgacctcgattttctcgaagaggatgtgggtgtttatgattctagtaaagatgactattacagaacagttcgtgataatatagtttgggttaaacgagaaattggtgcgtatcctgggcaagatgttaacggacaacctaagcaagacgctccaggctctggtatgaaataccgaatcattaataatgcgtcagctatagtaaaacatgacgagcgtattcaggcgctagaggatgcatacaatgattcagacgtaggttctctgactattgaagtaaacgacctgcgtaaagaagttggtcctaaatccggagctacgtcagcttcaatttatgcaaggcttgtgaataacgctgatgctatttccgcagctaataatgaaatctttgctattaaccaagccattgattttaccaatccagtaaaaattggagctcgtactactagattagaaaacgattatcgtatagttgacgcaacacttaactctgcacaaaccgggttagttcctcgtgtcaataatattgatgctcgtttggggtcttctgataagcctgatactattgaaggaaaaattagttctctttcaactgaccaagggtacatttctgatgttgtaggacgtgatacttcatcaggacttcagggtcaagtagcatggataaatcagcaagttggtattgttcctggcggacagccgattcctccggggtcaattttagcgagaatgaccaatgttgaagggatgcaaaactctcaacagtctgctatccaggacattcaagtagaacttggcaataacagcgaagggttaaaaggttctgtatttacgttacagactcaaatgaatggtgacttttcgtcagaaaatccggttcagcgggatggcgtgtatgccactgtagtagaattgcaagataaattcgtgactgcagttactgacgtagaacagactggagcatacctccgtaaacggggcgaatggtttaagaagccttcatcaataggtgaattcagtaaagaagatttcactgttgatttaagttctgatgcattggtaaatcctaactcattggtcgctgcttcattcaatgctggcattcgtattgtcgatgatattattgtcgatgacgatggcgtattttgtgtagaaactgatacagttatcgaagcttctgattcagataaagccgtccaaattgttattctcgtcaataacattgaggtgtttacttatagcctaggtgttaaagcagtaaccggcgagcaactgttgaaaaccaagaaacttattaagttttcgtctggcgatgcaatcaaaattgtgtatagagctgcttcagaagaatcaaaagttcctgttagtattaaatcattggatattactattcatccagcagtataatgaaagggaccttcgggtccctttttcgtataaatagaatataaagaggagcttatatgtcatacaacacatacaacccaaaaacgcttaaagacgctatacttcgacgtctaggagcgccggtaattaatgtcgaagtaactgaagaccaaatttatgattgtattcaacgagcattagagttgtatggtgaataccactttaacggattgaataaaggctatcaagttttttatattggaaaagatgaagctgataatgaaagattcttgaatggcgtatttgatttacgtggtcgtaatgtatttgctgtcactcaaatcgttagaacaaatgtaggttcattaacttcaatggatggtaatgctacctatccgtggtttactgactttttaatgggaatggccggaattaatggcggaatggggtcaagctgtaataagagttatggaccaaacgctttcggtgctgaccttggctattttactcaattgatgacttactggtcgatgatgcaagatttacttgctcctctcccggattattggtataactctgataatgaaatgcttaaaataatgggcaacttcatgaagggtgatatcattgtttgtgagtgctggactaaatcatttatgaataccgacatgatggtaggtaatactgcaggttacggcttcgctggtgaacaaacttccgaccattggggcttaggagataggtatcagaatcctaaccttcgcaataacggccaatatgcaggagaaggtaatacaaacagagaaggcgcgtataataatcgttgggtaaaagattatgctacagcattaactaaaaagctgtggggcgaaattctgtttaaacaccaagggctgcaattagccggtggagttactgttgatggccaaacacttaaagtagaggcccaagaagaaatcgagaagctccgagaggaacttgatttacttgacccgggttgtcctattctgttggggtaaaagatgactacatttgattctaggctcttcgctaaactcgaagattatcgaggatataataaaactaatgagactgaaattctcaatccttatgtgaatttttacaatcatagaaatagtcaaacgttagcagatgctttatcggctgaggctattcaaatgagaggaattgagttttatttccttcctcgcgaatataacaatccggatttgcttttcggagaagacccatcaagtaaattcaccaaggcttggaaatttgctgcttacttagactcttttgacggttattctggtgataacacgttcttcagtaaatttggtatgatggttaatgatgaagtcaatttgactattaatcccaacctattcaagcaccaaactaataattcagaaccaaaagcaggtgacctgatttatttcccgatggataattcgctgtttgaaattaattgggttcagccgtatgacccattttatcagttaggtcaaaatgttcagcgcaagattactgcgcagaaatacatttattccggtgagcagcttcaaccagagttgcagcgcaacgaaggaattatcattcctgagttctctgaacttgatttagaaccaatcaaaaacattgattctcttgctgatatttctgacgtacaatacgcagaaagcaatgaaatcaataaagaagctgctgaatatgttcatccgtattatgttaataacggaagaggacttgagtcccctcctaaagcagattcgtttgatgacgggttcttcgaataaataaaataaagatgggacctttgggtcccttaggagaaatcatgtttggacattggtataattcgtccttacgccgatacattgtattacttggagatttattttctcatgtacaaattgctcgttggcgtgaagacactggactaaaatatattaaagtacctatcacttacgcttcaaaggaaaagttccgttctcaactcggaaaatggactgctatccagtctaccgagaataaagcaaagatagaaactgttttgccaagaatgaatttgcacttggttgatatgcaatacaacgcgatgtataaaacatcacagttgaatagaaccaaatcatataaaaccccttcaaaaattacatctcagtataatcctactccgattaagatgatttttgaattgggaatttatacgcgcaaccaagatgatatgtatcaaatcatcgagcaaatcgttccttattttcagccacattttaacacgactataactgagctttacgacaaagacacaagctttaatcgtgatgttagaattgtattacaatcattttctcaggatgaagctgttgacggagataatattactcgtcgtagattagaatggtcattgatgtttgaagtcaacggatggctatatcctcctgttgccgaagttgacggcgaaattagaaccatttatttagatttcttcgctaacagcaaagagctaactccagaaggaaactttgaatcagtagatagcgaagtcactccacgagatgttcaacacgaaaattgggatggttctagtaaacaaacttattctcacgatattcctattccggtaaatccggaggctcctggaccaagaggtgaaaaatgagtgaattgcaattagatatggctaaattattagacatcgaaggaattcctggaatagaaggacaagaaattccagtttatgaaaaacttgaattagttgaagttaaatctaatccaaatgaccgtaaacctgacctcgaagatgactattcggttgttcgcaagaacatgcacttccagcaacaaatgttaatggacgcagctaaaatatttttggaaactgctaagaatgctgactctcctagacatatggaagtatttgcaactcttatgggtcagatgactacaactaacaaagaaattcttaagcttcataaagaaatgaaagacattacttctgagcaggttagtactggaaaaggagctaatcctcaacaaggaatgaatattcaaaacgcaacagtctttgtaggttctactgccgatatgatggatgagtttggagacgcctatgaagcacaagaagctcgagagaaaatagtaaatggaacagactcaaccgtttaacgttctgagtgatgcccatcctttaaatgacgggaaacaggtggttattcgccacccgtctgaaatggaaacgaaaattgaaaacggagttcgtttctttaaatcgcaatgggatgataagtggtatcctgagaaatttgaagactatcttaagctgcatgggatagttaaaattcgcctgcaaggtgaagacccagcgcattttcaaacgtttaaggataaaaataataagcgcactcgttatatgggattgcctaaccttaaacgagcaaacattaaaatgcaactaacccgtgaaatagttgcagaatggaagaaatgccgagacgatattgtgtacttcgcagagacctactgtgcaattactcacattgactatggtaccattaaagtccagcttcgtgattaccagagggacatgctggaaatcatggcagccaaacgtatgacttgttgtaaccttagtcgtcagctcggtaaaactactgtagtagcaatctttcttgcgcacttcgtgtgttttaataaggataaagcagtaggtattcttgcgcataaaggctcaatgtctgcggaagttctcgaccgtactaagcaagcaattgaattacttcctgactttcttcagcctggtattgttgaatggaacaaaggctcaatcgaattagataatggctcatctattggggcatacgcttcgagtcctgacgccgttcgtggtaactcatttgcaatgatttacattgacgaatgtgcgtttattccaaacttcatcgatgcatggcttgctattcaacccgttatttcatcaggtcgtcgttctaaaattattatcacgactacaccgagtggattaaaccacttttatgatatttggactgcggcggttgaaggtaaatccggctttactccttatactgcaatttggaactcagtaaaagaacgcctatataacgacgaagatatgtttgatgatgggtggcaatggtcacttcaaactatcagtgcttcttctcttgaacagttcaagcaagagcactgcgctgaattccatggcacatccggtactcttatttccggtatgaaacttgctaatatggattggattgaagttactcctgactcacacggattttataaattcaaagaagctgaagcagaccacaagtatattgcaacccttgactctgctgaaggacgagggcaggattaccatgcactaaatattattgacgtaaccacatctgagtgggaacaagttggagtattgcattctaatacaatttctcacttaatcctcccagatatagttattaaatatctaatggagtacaacgaagctccgatctatatagaacttaactctacaggtgtttctgtagcgaagagtctttatatggatttagaatatgagaatgtcatttgcgattcaatagttgatttaggaatgaaacagacgaaaaggtcaaaagccgtcggatgttctgcactaaaagaccttatcgaaaaagataaactcattattcaccatcgtgctactgttcaagaatttcgtactttctctgagaaaggagtatcctgggcggcagaagatggatatcatgacgatttaattatgtcactcgtaattttcgcatggttaacaacacagcaaaaatttgctgatttcgtggataaagatgaaatgcgtttagcatctgaagtttttaaacgcgaattagaagatatgaacgacgattacgctcctgtagtgttcgttgacgccgtgaatagcgcagaatatgcgcctcaagaacatggtctttcatttgtataaataataaaaagcaaacaacattgaggatatatcatgcctttagtctctcctggaattgagctcaaagaaacgagcgtacagagcacggtagtacttaacgctacaggtcgtgccgcaattgtcgggaagttccaatggggtcctgcatatcaagttactcaaatcactaatgaagttgaactggttgatatgtttggcggccctaataaccaaactgctgattactttatgtcagcaatgaactttctgcaatatggtaatgatctacgcaccgtccgtgtagttaaccgtgaagctgctaaaaacgcatctccattggttgataatattgaatggactatcactactgctggtagtaactatgaagttggtgataaaattacggttaaatatgcagaccaaactgtagatgacaccggttcagttactgaagtagatagtgacggaaaaattaagtcggtgttcattccgacatcgaagattattgcatatgcaaaaagcattaatcaatatcctgatttagggtcttcgtggacaactaccattacttcacagagttctggtgtttccgctgtcattactttaggtaaaattatttctgagtctacagttttactgactgagcatgaaactgcccatgaagaaatgacaaaaaccgaattccagactgcgcttgcgcaatataaaatgcctggaattgtagctgcgtatccgggcgagctcggaaaccaactggaaattgaaattgtatcaaaagccgcttttgataaaggcgaacaactgacgatttatccgagtggtggacagcgtgcatcaaccgcaaaagccgtatttggatatggtcctcagaccgatactcagtacgctatcattgttcgtagagatggcgcggtagtcgaatcaacggtgttatcaacaaaccgtcaagataaagacatctacggaaacaacatctttatggacgattatttctccaaaggttcttcacgttatatatttgctactgcgcaaggatggcctgaaggattttccggtgttattcgtctgggtggtggggtttcagctaatgaatcagttactgctggcgatttaattcaaggttgggatttatttggtgaccgtgaagcattgcgtgtaaaccttctgattgctggtgcttgtgccggtgaaacagatgaaatcgcaagcacagtacaaaaacacgtttcgtctattgcagatgagcgtcaagactgtttagcactcatttcgcctccaaggtcaacgattgtaaatattcctctgactcgtgctgttgataatttaatcgactggcgccaaggtgatggaacttatgattctgctaacatgaacattaataccacatatgcagcaattgacggcaactataaatatcagtatgataaatataacgacgtaaaccgctgggttccactggctgccgatattgcaggtctgtgtgctcgtactgatgatattgctcagccttggatgtcaccagctggatatcgtcgtggtcagattctgaactgcattaaacttgcgattgaacctcgtcaagcacatcgtgaccgtatgtatcaagcaggtattaacccggtaacgggtcaaggtaccggtgatggtttcattctgtttggtgataagactgcaaccactgttccaactccgtttgaccgaattaacgttcgccgcttgtttaacatgctgaagaacaacatcggtgattcttctaagtggcagctgtttgaattaaacgataactttacccgtagttctttccgtatggaaaccagccaatacctcgcaggtattaaagctctgggtggtgtatatgacttccgagttgtatgtgataccacgaacaacacccctgctgttatcgaccgcaacgagtttgtagcgagcttctacatcaagccggcacgttcaattaactatatcactctgaacttcgttgctacggcaactggtgcagatttcgatgagttaatcggaccacagtaatatgaaccccaggacattctggggtcatctaatctttagatgataaattatattaccgcacactttaatagcctctatgatgatgtagtcaatcgagaggctatataaatatctataggaaacaacgatggaattaacagacatcactcgtgcgtttgaatctggtgactttgcgcgtcctaacctgtttgaggtagaaattccttatctgggtcgtaacttcagtttcaaatgtaaagcagcaccgatgccggcaggtatcgtagaaaaagttccagtcgggtacatgaaccgtaagattaacgtcgctggtgaccgtacttatgacgactggactgttaccatctataacgatgataaacatgaagtacgtaaggcaattattgcttggcaagctcaggcccacgctcaaggcaatgatatctctggtatgactccagctgattacaaaaaagttgctacggtacgccagtttagtcgtgatggcaaaactatcacaaatgaacacaccattactggtctgtggccaactaacgttggtgaagtacagatggactgggattcgaataatgaggtagaaacgttcgaaactacctttgctattgactggtgggaataatgttatggggcttcggccccgtatcgaagttctgtgagttatttgcttaaatatctgacaaaacttcgatataaatatacttatagataatttcggagactccaatggcctttcatattttggacttattcgctccgtgggaaaaacgtgacgaagctgaatataagcaacaaatcaacaatgacctagagtcaatcactgctccaaaatttgatgatggagctcgtgaagttgaatcaaacgaaaacgaaatccagtataattcattcaaccaaatgatgtttggttccaatgaacctggaatgaaaacaactgctgatttaatcaacacttatcgcagtttaatgaataactacgaagttgacaatgctgttgaagaaatagtttctgacgcagttgtatacgaagacggtcatccagtagtttctcttgatttagattctaccgatttcagtcaagcaattaaagaccgcattcttgaagaatttaatacagttttaacatgccttaatttcgagagaaagggcgctgaccatttccgccgttggtatgttgactcaagaatattcttccataaaatcgtcaacaccaagaaaatgaaagacggaattcaggaactgagacgtcttgacccgcgcaacttacaattcattcgcgaaatcgttactgctgatgacgctggtactaaaatcgttaaggggtacaaagagtatttcatttacgatactggcaaagaaagttattacgcagatggtagattatattccgccggaacaaaaattaaaattccacgcgatgctatagtatatgcacattctggactagttgattgttcaggtcaaaacatcatcggttatttacaccgagccgttaaacccgccaaccagttaaagctattagaagatgcgttggtaatttatcgtattactcgtgctcctgaccgtcgtgtgttttacattgacactggtaatatgccttctcgtaaagcggcagcccatatgcaacatattatgaacacgatgaaaaatcgcgttgtatatgatgcatcaaccggtaagattaaaaatcagcaacataatatgtcaatgacagaagactattggttgcagcgtagagatggtaaagcagttactgaagtagatactcttcctggtatgtccggtatgagtgatatggatgacgtccgttactttagaacagcgttatacatggcattgcgagttcctctttcgcgcatgccagatgcaaataatcaaggtggtgtgcagtttgatgctggcacaacaattactcgtgatgagcttgattttgctaaatttattcgtagattacagcataaattcgaagagattatgcttgatccgcttcgcactaatctaattcttaaaaaagttttgtctaaagatgagtgggaagacgaaataaataatattaagattgtgttccataaagattcatatttcaccgagttgaaagatgctgaagttatggagcgtagaatcaatatgctcacaatggctgaaccgtttatcggcaagtatatttctcataagacagcaatgaaagatttccttcagatgtcagatgaagaaattgaacaagaagccaagcaaattgaattagagtctaaagaggctcgcttccaagaccaagaaaatgaagaggatttctaatggaaaattatatttccgcaattgaatccagagacctcgtagcagccaaaaaagcttttggtgcaattatggctgaacggacatctggtttaattgaagagcgcaaaaaatttatcgcagcgtctgtcatgattgagggtgaagagcccgatgaggacgaagatgaagacgacgaagacgaagataagtctgatgaagacgacgaagaggacgagtaatgcttatactgcctgaaaatcatgaattagttatcgacgctgtcgaagcttttcttcctgaagcacaggcacgttttgataagttgtccgccgcgctctctaaagatgatataaataaaattgtagagaatcttgttgtctctgagcctgatttagcaattgctttaggtgcaatcaatgaatctctacaactaaatgaatttatcgttaaacacgttgattctaaaggtactattacacgtactaaggatcgtaaaacacgtgagcgtaacgcgttccaaacaactggactttctaaagctaaacgccgtcaaatcgcgcgtaaagcagtaaaatcaaaacgtgctaatccatcggctcaaactcgtggattacgtaaacgtaagaaagcacttaaacgccgtcaggctctggggctaagttaatggaaaacctcaatgaacaacttttaattgagcattggggtcaaccgggcgatgtaattgatggtaaacccatgctagaatctattatcgttgaaggcgaaaatgaatctggcttaaaacctggtctgtatatcgaaggtgtttttatgcaggcagaagtagtaaaccgtaataaacgtctttatccaaaacgcattcttgagactgcggtaagtcgttatattaaggaacaggttgctactcgtcaggctctaggagaattaaaccatccacctcgcgcaaatgttgacccgatgcaagccgcaatcattatcgaagatatgtggtggaaaggcaacgatgtttatgggcgtgcaagaatcatcgaaggagaccacggtccaggtgataaattagccgctaacatccgtgctggttggattcctggtgtatcaagccgtgggcttggttctttaaaagactcaggaaaaggatataacatcgtacaagaaggctttcgcctgactgttggtgtagacgcagtttggggtcctagtgctccggatgcatgggtacaaccgaaacaaatttcggaaaatacctcggcacaagttgccaatagtgctgatgatgcttttatggctctcgcagagaagttaaaagcgttataaataattatgtaacttaacacaggacatcaaaaatgcttaaagaacttttaatgaccgaagctaaaactatcgatgcttccgtcgctcttgacagtattttcgaatcagttcagctttctccggaagctaaagctaacttcagcactgtattcgaagcaacagtcaaaaaacacgccgtagctctggcagaatctcacattgaaaagattgctgagaaagcagaagaaaaagttgaagaagaaaaagaaaaagctaaagaagaagctcgcgaagagctgaaagaagctgcttctaaatactttgaccatatcgctgccgaatggatggcggaaaatcagctggcggttgaccgcggtattaaggctgaactgtttgaatccatgtttagcggtatgaaagaactgtttgttgagcacaatgttgtaattcctgaagaatcagtagacgtagtcgctgaaatggaagaagaacttgctgagcaaaaagaagaaactgctcgtttatttgaagaagtttctaagcgtgatgcttatatcaattacgcccaacgcgagtatgctattcaagaagcaacccgtgaattgactgatactcaaaaagagaaagtagtttctctgacagagggtatggattattctgactcgttttcaactaagctgaaagctattgttgaaatggtgcagggttctgtagagcagtctgtaacggaatctgccgatataaatactatcgacaaagaagcagacggtttaaacttcacaactgaagcagtcgaagaaactcctgcgactaaaaccccatccgttatggatgcttatgtagcccaagcggctcgtctttcttaatttaaaaggttatacaacacatgaaaaagaataaacttatcgaaaaatggcagccgctgcttgagaacgaagctctgccggaaattgttggcgctagcaaaaaagctctgatcgctaagatttttgaaaaccaggaagctgatattaatcaggctccggaataccgcgatgaaaaaatcgctgaagcatttggttctttcctgtctgaagcagaaattggcggtgaccatggttatgatgcacagaacatcgcagctggtcagacctctggtgctgtaacccagattggaccggcagttatgggtatggttcgtcgtgctatccctaacctgattgctttcgatatctgtggtgtacagccgatgtctaacccaaccggtcaggtattcgctctccgcgctgtttacggtaaagaccctctggctgctggtgctaaagaagctttccatccgatgtacgctccggatgcaatgttctctggtcagggtgcaaccgagaaatttgaagcagttaaagctggtgctgctctgactgttggtgatatcgttgttcacgatttcgcacagaccggtcgtgctcatctgcaggttgttgaagatttcactgtagacgctggtgctaccgatgctgctaaactggacgctgcagttactgccgctctggaagctggtaaagttgtagaaatcgccgaaggtatggctacctctgttgctgaactgcaagaagcctttaacggttcgaaagataacccgtggaatgaaatgggcttccgtatcgataaacaaactatcgaagcgaaatctcgtcagctgaaagcacagtattccatcgaactggctcaggacctccgtgctgttcatggcatggacgctgatgctgaactgagttcaatcctggctaccgaaattatgctggaaatcaaccgtgaagttgttgattggattaactactccgctcaggttggtaaatctggtatgaccaagactgttggttctaaagccggtgtattcgacttccaagacccgattgatatccgcggtgctcgttgggcaggtgaaagctttaaagctctgctgttccagattgacaaagaatccgctgaaatcgctcgtcagaccggtcgcggtgaaggtaacttcattatcgcttcccgtaacgtagttaacgtactggcagctgttgataccaacgtatctccggcagctcatggtctgggtcgtggttataataccgacaccactaaagcagtatttgctggtgttctgggtggtcgctaccgtgtatacatcgaccagtatgctcgtcaggattacttcaccatcggttataaaggtgctaacgaaatggatgctggtatctactatgctccgtatgttgcactgaccccgctgcgtggttccgatccgaagaacttccaaccggtcatggggttcaaaacccgttacggtatcggtattaacccgttcgccgattctgctgctcaacagccgaaaggtcgtattacctctggtatgccttctatcgtcaactctgttggtaagaatgcttacttccgtcgtgtatgggttaaaggtatctaataccaataagggagccttcgggctccctttagttgttttaatggatataaataaacttataaatccacagaggaaagcgcaatggctaaaatcaacgaacttctgcgcgagtcaactacaacgagtagcaacttaattggtcgccctaatctcgttgcattaacgcgcgcaaccactaaattaatctataccgatcttgttgctatacagcgtactaaacagcctgtagcagcactgtatggtattaaatatcttaaccctaatggtgacctgacgtttaatacgggtgcaacttatgcaggtcaaatcggggcgacggaacgtgagtcaattgaagaactcactatgtcaaataaagactcattcaataaagacgatatgttcaaatatcagaatgtggtctttaaagtacttaaagatgccccgtttaccgatacagcagaaaccgacgaatttggaattgtatctgaagcagtagcagctaataatattcgtatgctgtcagatgctgcagtcactgaaaaatttgaaggacccgattcagacccaatcaccgaagccagttttaaaattgataaatggcagacccaggttaaatcacgtaagcttaaaacggatttaacggtagaattagctcaagacttagaagctaacgggttcgatgctccagagcttattgatgatttacttgctactgaaatggcagaagacattaataaagacatcctgcaatcattgattacggtttcttctcggtttaaagtagctggtgtatccgataaaggtgtattagatttaactaagcaggattctgctccggaacaaggtcgtactctgtatcgtttcatttgtgaaatgaattcagcagttcaacgtaatacttcttattctggtacttatgcagtagcatctactcgttgtgctgcggtgctggcagcttccggttggttaatgcagaagaatgatggcactattccggacaacgcgtacggtatgctgaataacggcttacctctttattgtgatactaccagcccagttgattacgttattgttggtgttaaagcagaatttggtgggaaggaaactgtaggttcattattctatgcgccatataccgaaggcttggatttagacgaccctgagcatgttggtgcatttaaagttattgttgacccagctagcttgcagccttctgttgctttactggtacgatatgcgctgtcagttaacccatatactgtaggattggacgaggacgaagctcgtgtgattaatgctgcggatatggataagatggcaggaagaagtaagatgtctgttatgcttggtgttaagttacctaagcttattacggactaatttatgggagccttcgggctccctttttgctataaactaaatatgtcaaacctcggggagtattcctcctcgagggatttaaacactttcttatcatatagattaacacattctatcccgtgcctgcgagctatatcaacagctactctcgtccctccagatacactcccgcatcttttctcaggcgcccaatataataccttatctacaggctcagtgcattctaggcccaatacctgcatagaattccgtgcgaataaagtctgcactatcttcgagcattcatcccagtacgacgtaacttctctcgccttaatgatgcttttgattttggcttcgtttgataattcagaccatacaacaacacctgtaccaggaacatggccacaaaagccagaataaggaataatcctacaagaatttgacctatcgtatttcgccaaccacgcttcatctgaacccggagctccacctgaatatgaaaaatgcccctcttccgagaggcgttgacctattgtagtcattagactcagaactctgcgtggcgcttctcgtgaaccaataagcgccaatctcattattctaaaacctcatgccatttgctacgaatagtgttttgaattaaagtagtcagttctttcttaactacagaaggattatcagcgaataacatatcgtgaccttcacgagctgcttcgttaatgatatctttcatagtcagtcccataacacgaccaaaatctttggcagttacagtaccaatatgagacagaacgttacttacacggttccaggttacatattcagaaaagatttccagaacacgcttatcagtatcagtgagttcaaccttagctttaataggcttatcagatttagctttctcgctgaacttagaattcttgcacttaatagctacgcgggtgccgttattaaagaatttaggattaaccggtttaagaacataaccttcagctacaccggtttcagaagaagcctgtggaccgaacacatgtttatttgcatgttcaaggtcagtcgtgtcaacaagttcattgtagtaattgacaatagatttaaagtcatttacatactgagatagctcggcaaatgaacctcgaccaagaagtggagccaatttaagaccaagaccagtagcaaacgattctactacataatcgtcccaataaactttttcgttaccggaatccgacaggatatcaaatacgtagaaatctttctcaccataatctacgcccttctgaataccaccgccagcaaattcaccgaagatttgaacagacactaaatccatggcgttcagcatattctgcatcttaacgaaagaatccttatacttcttcatgataatatcatgaccaaagaaactttcactttctaaaataggcccagtacgcttagccggaacgatttcggtaggagtaataatcacactaaagttagtgccatgaatcttctcacgagctacccactcaacggtatgcatatcaaaaccagcaccacgaattttctcgatgaacttaccgttgtaatggttctcgagactagaatattttgcaaacattataatttccttagaatgtgattttcataaagtcagtatcaccattacgctgggcactggtataatttgtaacaaatccttcatcatgcaaataattaagaacgtttgtgatatgtttcttaactaaactgctaggatacataattaactcacgttgacccgctaaagcggttttctcaatctgagttaatacttcttcttttgctgcactcaattcttctgtggctacgttaatagcagtattagccattctatctgcaaggttcataatttttctctcaataaataaaataaaaccaggagtctatcttggtcaaaatggtatcagaggatttcccctgagcccattataccacatcgatttttaaagcaattaatatccgcttggaacaaagcgatacatgatatatccgcttttagttagcatgatttcaaattgacttttgcttccaacctcaagtactaatggaatatctttatccatcagcatccaatcaatttttccataccgttcattaatcaaatccgttattttacgtgcaccacttttatagtagtaagaactctgaacagccatcattttactaacaaatttagatgcaaacaaccagacatttaccccattagcagctggcgtaaatttcttagaaagcatttcttcaaatcgttctactacaattgggtctactttaggcattttcataatgacctcatgtgtttaacaagtttcttatgacgagattttataccaacgtttgttaagcgtttccgatatacgactttttctttttgcttaaaccgttcgtgtgctttctcaactgagacccacaatttagcagcttccgctggagtgatatctaacgcccttgcaatttcttgaaaatcttttccgctttcatgcatcaagtgagcttgtaatgctttcataataacctcatctatgtgacgaggacataataaaccaatccgtgaatagcaaaaagggagcccgaaggctcccaaatattacggatagataatacctgcttcaagcgcagtacgatgaacaatgtatccatttctagattcttgtacatcgacttctggataatcatctagcattttagctagagtataccgatgcaggtaataatcactgtcagggtcgtcgagtttccaatctttgccctcaacagtcattcgctggatttcatccattacccaccatccacaccagatataggctgttccacggaacggtagaggatgaatatacggaagttctccgtctggctcaggggctacctttttagtaaaaacaacctcgacacctttagtagcagtagccgggttgtaatctgctgcagaaaccgtgacttcgcaatttaaagtataattagcctctgccgattcagttacggtaattgttttagcagtctgaccatcaataacgtcagcaccacgtttccaaacataagcaatgcttgctcctgacggggcaccagtaacatcagctgtgactacttgggattgaccaatttctttagaaacagaagttgggctcaaagttaaagtaatcgcaggcatagttttgttattaacggtcagagtagtttctgcttcagccgtttcaggatcgccttcagccggagtaacagtagcaactactttaacggtcttactacctgcaggtcctgccgcaacataattcatagctgcggtaacagaagattgttttacaccatttactgtccatacaaacgcttctgtgccttcagctgtggctccagaagttgttgcagtaaaattggttgttgctccaatgactgccgaagcagccaaaggagcaatagatacgctataagccatagatgttccttattttaaagttacaaatgaagaattacgtgtttcacgaatcataacagacccgtttcttttgatgtaatagattaaactaaacagtgtctggtgtgctgatgggtgttcaaacgacgttggccgagatttccagtccgggttatctttaatccattggtaaatccaccatggaagagtaatatatcctgggttcttacctagcaattgcatgtttggactaaagtttttaggaagctcaatggtttcatcagttttaacaattttaactactttgtccattgctttggagaattcttcagggtccgtagtactaattggaatgtttgtaagttttccttcatcatcgatatggataatgctatctccaataggagcttcagcataaaatcctttatcattgatagaaggagtttttacttcaaatccagggtcatttactttaggtgtttctttataaaaatctgggtcaatatcatgaattttaataccagcattaactggagcatcaaacagtagttttgcttcatcagacgcttcatcattgaaaagtgcttttccttcaatttcatcatctgcttggattaaatcagcaattgatagaccatcgttgtcttctggcataggctcatcggccaatttagccagttctttttccaaatcagcaaccatattgtcaaatgagcgggtcttcttcagtttaataccgaaggttttggcatattcgtcgagcttgtctttagcttcttttttatcgagtgcctgaatttctttaatatagtctttatctagcattgggtgtgcctcatgtaatgtataaatatgattgtatttataaactgaggatagtacagtgcacgacatccaagtcaaatttaaagattttagtcatgttcatattgagtgtgatgactcaattttctatgaactcagagactattttagcttcgaagccgatggatacagattcaacccgaaataccgctatggacattgggatggacgaattcgtctgctagattataatcgtctcttaccgtttggtcttgttggccaaatcagaaaattcgctgaccaattcggatataaggcttatttcgatccagctatattcgagcaagaaactctttcgcgggaggattttgataattggttatcaactaaagaaatttattcaggattaactaagattgaacctcactggtatcagaaagatgctgtatatgaaggtctagttaatcgacgtagaattcttaatcttccaacgtctgctggtaagtctcttatccaggcattacttgctcgatattatgtagaaaattacgaaggcaaggttcttatcatcgttcctaccacagcgttagttgaccagatgattgatgatttttgtgattatcgtttatttcctcgcaatgctatgctgggtattcgaggtggtactgctcgtgattcgaatgcattagtttatgtatctacctggcagaccgctgttaagcagcctaaagaatggttttctcaattcggcatgatgatgaatgatgaatgccatcttgcaacgggtaagtcaatttcaacaatcattgcgggtctcaccaattgcatgtttaagtacggactgtctggttctcttaaagacggcaaagctaatatcatgcaatatgttggtatgtttggtgaaatcttccgtccagtgtcaacttctaagttaatggaagacggacaagtaactgagcttaaaattaatacaatcttcttaagatatccagatgcagccgcaaatgctttaaaaggaaaaacgtatcaagaagaaattaaattcatcaccaatgttaagaaaagaaatcgttggattgctaatcttgctactaaacttgcagcgcgtgacgaaaatgcctttgtgatgtttaaacatgtagctcatggtaaagagctattcgagatgattaaagctgctggtcatgagcatgtctattatgtgtcaggcgaagttaataccgaaacacgtaatgctttaaaggctatggcagaaaacggaaagggaattattatcgtcgcaagttacggtgtattttctaccggtatttctgttaaaaacctgcatcatgtaattttagctcatcccgttaaatcgaagattatcgttctccaaacaattggtcgtgttcttcgtaaacacaaagataaatctttagctaccgtctgggatatttgcgacgacctgggtgtaaagccgaaatctgctaatgctaaaaagaaatatgttcatttgaattatgcactgaagcatgctctcgaacgcatccaaagatatgctgatgagaagtttaactatgttatgaagactgtaaatttatgaattacgaaaaacattattatactttgatcgagaggcgtaaagcctctccagctttaggatacactgaaacccaccatatcattccaaaatgtattggaggtactgatactcctgacaataaagtttctctattaccagaagaacatttcattgcgcataaattattagcaaaaatgtatccaaatagttatggattaattaaagcagtaatttgtatgggaatgtcttcaagaacacacaaaagaaactataataaaagctatgcctgggaacgcagacgtatggctgaattacaaagcggagaaggtaatccgttttatggaaaacatcataccgaagagcataaacttcatatatctaatattatgaaaggacgtaaaataacatggggagataaaattagcgatactaaacgtcgcaatccaactaagtggagcgacgaagctaaagcagctcactctataaatcagtccggtaaaaacaatggaatgtttggaagaaaccatagtgaagaaaccaaagcaaaaattcggttaaatagaaaagatacccagggtaaaaacaatccatcggctaagaaaatagtagtcgcaggtatagaatatgggtgcatgaaagatgcctctattgcaaccgggttatcaatgtataaattaagacaattgaggaacctatgattaaatttgaagatatttatgaagccacaattcgtgaggctactatcgataacttcatgagtaaaattaatgcttgccagaccttagatggtctggaagaactcgagaagtattacgataagcgctctaaagaaactactcttgctgattctgatgacatcattgtgcgggatgctttggcggggcgtagacaggctcttgaagccgattctgaagatgaagatgacgaagacttctaatacaaaaaagccccaaccgaaaggaaggggcaaagccaattggctacatcaacactagactaaattaaaagctgcgtttcttgcaattgctcttctgtgtcttcagtgacaggcaattcaatcgcataattatagcaagctccgggatgaaccgggcctttgtctgtttggacaaccaatgcttcatcgattggtcctttacagacgacacataccgtattcgacatgattgtctccttagtttacaagtttatttattacgcgccagcttcaaactgacgaaggtcaataatgtgcttaatgctaaaacctcgtgacttgatagcatccattgcatcgctacagaactccaaaagaattccccaatattgcaatttagtatctacacccaagatttctttatcagcgcttaaaacagttttcatttctgatttttcatatacatccatgcatacttcaccaccaacctctccacggccagtgtaataatccaatcgtgctttaagattttgctttttgagggcatctaatcttaacatctcttttcgacaagtcgagtgcttacgcacccatttaccatacagaacggggttattagccgcttcatactgtagtttagtctggtcgataatcaaatcattatccaattcatcctgtaattcttctaatctcattctatctccactctactgtttcttgggaaggactagtcccattatactctactgctagagttagcattactacgcatctgtatgcgtatacgttctagcgtatcagggtcgtctactatagaaaactgcacggtgacaattatagcgttatcgtcatataacggaagcacatcaactgatagacgattaatcctaggctcataattacgcacggcagagactatattacgctttatcgtatcaccagttaatggagtcatgttttcaaataattcgtttgtgatatcacagccaaacgctgggtcaaatggccgagacccctttctggtggttattattccaagaaggctatttttaaccgatcgtgctcctaccgtttttgacacatcagtatcccaagcaagtcgcatctctgggtcaaggtcagaatatagtttatcaatattgctcatgacataatcttaaagaattctttaagccccttaattacatgaatgtgagaaattccgcattcacaagtaatgggaactgctaattgaacctgcggcttcaatagcatatttttgatgttaactacatcttcggttgtaatagcagaatataaatcatcgatttctgcatcgtttaaatcattaaagtaaatctgctcatttccaaccacgatataatctatgcattttgatatcatcattggaatgtctgaatcgtcaaaaagattcggatacttaaactttatcttgaatccctttaagtcataccagaggtcttctggaggatcgatttgtgcatgtgtataatttaatggcacaggaattttacgcccacaggtgcaattccaggtcacctcatgattaacctcgcctatactatgagcccaaagtataactataagtaattccgattcttgtttgtttaacccagtagcattagtacattctctgagcaatgctttaacacattcatcgattgtaccgtttttcttcgctgcaattaaattagcgtattcttctagtgtaaaagctcggcactggatattcttgccatttattcttgtttcaaatttatatgtgatgttcatatccactcctcttattcaattatttataaatagtataaagaggattaccttatggccaacatagttagatgcgaattaccagatggtgtccaacgttttaaaccatttaccgtagaagattatagagaccttttattggttagaaacgacatgaacaccaagtctgaagaagaacaaaaacagcttatagcagaattaatggatgattattttcatgaccatcctgtcgagtatcgtccttatatatttcttaaagtatttttgtcaagtattggtaaaactaaaataccagtcagaatgaagtgcccaaaatgcggaaaatataagcagtatctttttaatcttaatcagcctccgttgacaaatccgaaagtagaggttgcaggattaacgcttaagttcaaaaaacctatagaaataattgatgatacaggtaaaatgattttagacaacattatatctgtgaaggattcatctggggaataccaatggaatgaattaagcgatagtaataaattgacagttatcgatgctatagatgttgaaaccttggaaaagattttatcgcagatgaagccgtttaattttgagctaaagacgtcatgctgtgataccacgacagtattaaaatatgataacattgttgatatctttaagctattgctacatcctgacgagattttcacattttaccaaattaaccatagattggtttctcaaggtaaatatgacttgaattctataatgaagatgctgcctattgagcgtggcataaccttatcgcttattgaaaaggaccttaaatcatgacaacacaaagattaggatatcctaatataagcataaaattatattctggatatgatgcatggctagctaatagatttgttgaattagctgctacatttattacattaacaatgagagattcattacgcgggactaatgagggtctgctccagttttatgactcaaaaaatatgcatacgcgtatgaatggcgatgaactagttcaaatatctgttgcaaacagtaacacatcgagaacacaaactcgaatttacggaattaaacactttacagtcggtgttgatgataaaggtgatagcattatcacccttcagcttggaacgctgcatgacataatgaatctcaagttcagcagagcgttttttagttctgcatatgaaactataaaagaaatgataggtgcaatgtatgttgaccaaccgttgattgctcctcctatcaacggaattaacgcttacgtcccacgagttccatggactagtactctcaaagattacttacgatacgttagaaacgtaggcatttctactgataacgaccaatttatttttgcctgggaagatatcactgggattaacatgatggattatgaatcaatgatatcccaggacccaaatgtattcatgtttggagctcctcaaacaataggtcagtttgctgcaggattaaaatatccattagcatgggattttgaatggcttgttaaatcaaatagatataatagaaatcccatgaaaaacgcaacattttatgcacactcgtttgtggacaaagatgttacccgaattattaatggagaaggccaaaacagcgtattcattaatagatcaggcggatattctgacatgatttttaggaatggctatgaagaagccttacgcatttctacgatggctcaatatgacgggtatgctcaaactaagtgttacggtaattttgaactaactccaggaatgaaaatcaactttgttgatttaaaggaccagttcagaactgacttttatatagatgaagttatccatgaaatatcaaataacacatctataactaacttatatatgttcacaaacggctctgcccttgaacctgtagatttgattaaggtgaaaaatgaacttaaacgtgattcttcctattaagaaaatagtaataaatgaaaagacgatatcaattccaaaacttggattaaagcaccataatctgatgaaagatgttaagggtccagatgaaaacatgaatcttcttttggattcaatttgtccaggattaacagcagccgaatccgatatcgttgtactacatttattagcatttaacaaccgaataaaagaaacagttgttaaagatgattttacctacgatttgaataaagtttacatttgccaacgattaactcaacggctagatggtaaagaattcaaattcagagctcctcctcgttattccaaactaggttcagtagattcaattttgagcgaatttcttgaatcagtagatggaaaaccaatggatataaactttatgaagcttccagcttttgtaacaaagtgggctgatgacttagtaaacactatagccattgatggacctgaaggaccaatcaaaggcatgcttaacgtaatggaaatatttgaatgactaagaaatcagaaatgaattcaatgcgtagaagagttattgctgactcggctccacagaaaaaggctgagtctcaagctgatgctcagattaatacgctagaagatattggtcgtcgcttagacgaccaacaagcatctactgatttaatttcggatgtaatagaaactaaatcaaacgaaattatcaaatcagtagaagatgtttcagctggtgttgaattaactgccgaagcttcagaacgcacaacagatgctgtctcgaaattaaatgatactgcatcattaattaatgataaactcacgaagcttgctgacttgttatctaaaaagcatgatgttcaacaagatgtccaaaaaactggtactggaacatcgttagaaacaataacggaacaagtacctgatgctccggttcagcagccgctagaggaattactcgaaaggcttattcctccacaggatgatagacgtcctgacgcggatttctttcctagcacagaagagcaagaggaaagaaaagaacctaacaaagaaactgaggataagaataaaaagtttcttggcctaaaatttggagaattaattaaaagcgttaaatctggttttggaaaaactatttcattaacagataagattagcagcatgctatttagctatactgttagcgctttggctcaaatggcgaaaactgccgcgatggttttgggcgtgataatgcttatagatttaattaaagttcattttaattattggactaaactgttcgaaaagaactttgttgaatttaacaagcaagccaaagaatggggtccgctattaacagcaataagcgagatgtcgaatgaaatagtaaaatcattcgtcaaaggagattggggtggattagctaaagccataggttctggattggttgatgtaattgacaagctcggagaaactattatgctcggaatgagtaagcttcttgctggaatgttacgcgcattaggattcaatgattcggccgataacattgaaggcgctgctttagacagatttcaaactgttactggagcagaactcgatgaagaagatgctaaaatgagagcaaaatatgttgaccgccaggaaagagaatacgacgaacaacctgaatggaaaagaaagctttctgctaagttccaaaaattcaccggtcagattgatgacgatgaatataacaaactgctaagcggagagaaaaagcagtcagcgtatgcagacttgccagaagacgaacgcctcaaaatcatcacagctcgtaataatgctgaagcagaactcaagcgaacaaaagcgtacgttgaaaaaactgacgcatctgattccactcgattagactctgctaaggatgcagtacaaagcacaaccaccagatataaagaattggagaaattatctccagaggttgcaaaagacttaaaggttgaattagaccaattgcaaaaactccttgattctaaaatatcagaacccgctccaactgccgaagctatacctgcaacagaacaacttgaggttaaacagtctgcttctattaaagccgctgcggatagtcgtgaagctgctcgtacacgtgaatctaatacacagtcgcaacctattcaggttaataccgctgtaaataagaatagcacatacgtttatagaacgcctccacagacttcaacagctgctcctggaatgcaaggcgctatgaaaacctcttaaggaaaaacaatgatttttgaagaactggccgatggccttgaaaacatcaaaaaatcaggaactcgaatttcccaaggtaaatctaaactgacgaatgcgccaaccactaaggtggcgcagttcccagctgaacgttcagctgggaatgattccgcccaagatatgagagtacatgacttatatcgcaacgggttattattcacagcatatgattttaaaggaagaaccactcctgatttgcgttcatttagacgagatgtaatgttatcgtctgtattcgattcaccaatgtcagcaatggctaattcatcaagttctactacaagtactgcgccggtagctaatattctattaccacggtctaagtcagacgttgactcggttagccataaatttaatgatgttggggattctcttgttacgcgcggcagcggtactgctaccggtgtattaagcaacgtggcttctactgcggtgtttgggtcgatagaatctttaacacagggattaatggccgataatggtgagcaaatttataacactgcccgtagtatgtatgccgggcctgataatagaacgaaagtgtttacttgggatttaactcctaggtctgcagatgaccttatacaaattattcgcatctatgaaatttttaactactattcttacggtgtgactggaaattcatcatacgcaaaagaagttaaagctgctattgatgaatggtataaaggaactcttaaatccgcagctccagatggggctaaagtagaaaacacagtgtttgagcaaataacatcgtttttaagtaatgttattgtagtttctaacccaactatttggactgttcgcaattttggatattctacatcaatggatggtagagaggatatatttggtccatgtcaaattcagagtatccgttttgataaaacgccgaacggacatttcaatggtttagcaattgctcctaaccttccaagcacatttacgcttgaaattactatgcgtgaaatacttactcttaatagaggaaacgtttatatcggaggtattgaataatgtttactctcgaagaatttaagagtcaagctgctgatatcgatttccagagaactaacatgttctctgttgtattcgctactgtaccctctagtaaaacccaggctcttctaaacgactttggtggagagctgtataataatatgggtttagatggaaattggcttggattgacaccaggtgaattcaatcagggtataacaactatagtgacacaaggaactcggcaagttgttcgtaaatcaggtgtgaatacatttatgattggcgcaatgactcaacgtgtggtgcagtcattattaggagaatttacggtaggtacttatctgctcgatttctttaatatggcatttccaacagcaggattgatggtttattctgctaaaataccagagaatagattatcatatgaaatggataagttccataacgctcctaatataaaaatcacaggaagagatatggaaccgctggttctttcatttaggatggacccagaagcaagcaactaccgggcaatgcaagattgggtaaatgctgttgaagacccagtgactggtctgcgaggattgccacaagacgtagaatgtgatatccaagttaaccttcatgctagaaatggattacctcatactgtatgcttgttctcaggggctatgcctgtagcgtgtggagctcccgaatttacatatgatggagaaaacacgatagcagtgtttgatgtcacgtttgcttaccgtagcatgcaaaccggttcggttggaaaacaagccgctatggattggttggaagataaggctattcagaaaattgagacgattaatccaaatcagggcttgagtgcgtctgcttcaagattgtctcgtttaggtggggctggtggtggaatttctaatatcactactacgacaagtagaataatttaggggccttacggcccctttgttttatgcaatgcagccaataaaccctggctcagtacgaagaagtttcatttcgtttgtggtccaaactactttgaccggaataataccttctgctttaccgtttagaaccgcttcaacaaacgatggttcagttggcttacggaagatatcttgaataagaaccgtcggagtaccttcgttaaacccttcaagcatgataagaacttcttcattgaacttctctgcatctttaacatcagcagaccattcaataccgttaaagcggaatacatgtttcatatcaatttcctcattggtttgtgtaagtctatagtatcacgtccttgtgataagtaaacaactttatgcaagtttttctgggataccatccaggttgatagcaccagccagtagctccatggtacgtgtgtagctaaccttatctgtagaacggtctggagagaaataaatctcgtttaaaaagcctttgaacttgctttcttcaagaggttccactttgccttgttccatcaagatgtcaccatcatagagatgaaccgattcatcgatttgctctggcggaactaccgtcatttctaccatgaatgtcttgttattcgctacaccaattccatttctaaaaggagttccccatactttgttgactttcattgccaacccgcgaggaagaataacttcagcctcatcgctaaagctcgacaagacacctgggataactaccttaactttatcagccccatgaataatgaacccaaacttaaactcatcaccataggcaacttcctcgcctctatcaactctttccaagttgtctgttccaataacagaagataccgcatcgatagttgtttctttgttttctaaatcagagctaggagcatctggcattaatgaatcaccagcatttgaataagcaccaaagataattggacttaacgaagtagaaacatagttctggaaataaaacattttagactcaatgttatctttaaactcttcgtattttccgcgctgaccacgatacaaaagagtgcccggttcaagacgcaaacctttttcaaaggcagaatcaagcggacgaattttcttgtcaataatcggatcgcctaagctttccataccaataagataattattaacaaatgaataaccagaaccgcagtaatggtgtattgcatctctttcttcttcgcttaaacgagattgcatttcacggttatattcaattgctttggatatagaatcgccaacaattgacacataagcggatatcatataattgacaagattttggtattgacgtaaagctccgaaatcgtcagctggaggcatatcaaatccacgagtagctacttcaacgattttacgcattgtttccatagatgcaggatttttagcttgagcaataacgtcagcaacgtctgaaattcgttgctcagcgattttcattttgtctgaacctgaaggaatgaaaaccttccagtcgtcatgcattctcgacatttggcctacaaataatctctcaactgcatcgccaaaattacttccatatccgccacgaacacgatagtgcttgatatcatcaacataaaaaggaattgatttttctaacccggatttaatatccttttggaggtctactgtatcgccttctgcgttcagtactggagtgttagtagttaattcgtaccagcgttcacgcttattttctggccaatcttcatcaacatatgaaacaaatttgccgtactgtgctcggattaaatcttttcgagacactttcattttactcattacagcgagttcagatttcttgtcttctttttcgccaatggaattagccaatgcttcggctttggtaacgttttcgccggtttctttagacacataaacttcgcctactttgcaatctactttggtgtaaagttcttctgaaatttcaggaattccttcaatctcttcaagtttcttacctttacgaaccataatagaataagcatacttacctttgtagtaagccatatctttcattagattgaaacgaccgccggtgcgagtagtaatcaaccgagcaagaatacgctggatagctttatcttgtccttgcattttctttggattaaagcggaacattactgcatcggctttaatttgtttaactactttgttaaccgtttcaaagatggtattgatagcaccaatcgggtcttggcctaaaccgcctttaagcgcaccgatgttacctttttcggatacagagaaaacatagacctggatgaatttatcacccatcttgatgttcttaactgcatcaccttgacctgacccttgtactaaccgaatcattaaattgttattacccggcaccttaatcaaaaagacctgtggtaccttaagttttggcttaacgttctcgacaggatagattttactattctcttcatcgaaaacttcatttaaaagttccatgacatatcctcgtttgtttattctatttatacgaaaaaaggcccgaaggccttaattaattattgttactgtacgccaaacctgtagtccatttactgattcatactcttcaatgttttctttgaagtttcttaatgtgttaatgttattaaactcaagaacttctgtgtgaacagaaataccaccacgtccgtcagaagatttagcaatcacttcgtataaaactttcattttattcctgttgcctcagtaaagttaacaccaaacgcggcttcgaatgtattagccacttctttatcatatctacgctgtttaatgataggtaagaataaccctactgtaccatcatcacggccttcagcagttacccaaccattgcattcaagttcccagatagttcctggaagagaatctctgtttttccatagatgagtacgatcaagttcatgtaattcttcaggtttatctttaagaccagagcctgcattaactcgaatacgaccacattctgatactaacattaacccacccattttaccgggttgtttcctatgctcatatgaaccaacacacttcaaatcgacagtgataacctctttaaatttaacgaggttcttagaacgcttatcttcccaataagcaccgatatttttaaggatgataccttcgagaccttggtctacgtatgtcttatagatagcacgagcttcatggatgttgtgtacgacgtgattttcaattagaataatcttgtcatagcctttgctcatcatttccaacgcacggaaacgtacatcataagcaaatccaggaactttaccttcagaatatactacatcaagcggaacataatcccaaacttggaatctcataccttccgcttcttcagcagagattgttcctttgattgccttattagccaatccgtttgattccgtgcgagccgtctgttggaattccttagctttacttagctcaggaagctcaggctctttaaacatatcaaacaggtcgttttcttcttctttcacttcgacatgatataccaactcgccatcaatcatcacaccattaggatggcgttcgcgggcttctttggtcatctcgataagttggcgcttgagtttatctagacctaggtattcattaccagaacgagtaagaagagttacatcatctaattcatctccgcggatttcagcgaagcatcgggctccatcagctttaagttgtgcgaatgcagggaacttaatatatgacagtgctttctcagaataggctgacgccaacatctgtggcatctcaggaattaatttcttccataccttattagcaatagaacctgaagcgccgcaacgcatatccttaagaagtacacggaccagtacactagcatcaccctcgttcatcttagagagcaaatctactagcccctggattgccatattacccgtaagtactcgtgctgccagaatgtcttggaggtaatctagaccatcagaaaacgtctttgaaggaacatttggatatttaacgggagtatattctggaactttcttaataaagaatttaaaccgcccggaatacgccagcagataagctcgttttaaatcaacgttatctttattgtcaacgagaatttgggttttggctttagaacccttagcatcttcaattgctttgatgatatcaaaaatcattattcacctaattcttttgaaagttcgcttacgctacgatgataagttaatccatcgatataaacaaacccgttattgatgcattcattccaaatcgggcacgactttgcttcacgccaaattggattccaacgataaaactgattaacatgaccataatcacatgataaccagcgtttacccaccttagtatgaactacaaacatatttcctcctagggtatggctattataccatacccatattgttagcaattaatttggttgttatcacatgtaatacgaccgttattccaccagtcgtttccaggaggaacatgcgaaccaggtctaaacggaatgataggttgtttccaccaatctcctggaacttgtcgtggaggccaattaaaaggatgttgctctttacgaatttggtctttgatagcttcttcccacaatccagaaagagacttctgaggtttcttaacagattccaaagattccaggcaagttacaatttgatgccaatcttcaaccataattccaggagcagtcactgaaccttctcgctcgccgcgaggcatatagaacacacgagtttcagtgtcttcaaatactttgctggccgcagcaatatgtttaggcaaatcatctacataacatacgatgcgatcgccgtattttactttagccttttccagtaaagcatctttagattcatcataatcacagaccatgatttctgtaaatgcatcagggaacaaagcattcagattgaaacggcgattaaggttagcatctactgagttgccaagagccgtgatagcgacaaaatcgtatttttctttgagcttattaactgtagctaaagcatcagcatacggtgcaaggtagcgaataaaatcactattgttatacttcagaagcagcttaacagccaattcttcttcacagtcaaacagctcagcgggtttaatgaatttttcagtagtcatcatatcaaggatatgctctacaggaaggttatatttttgggcaaagtaaggcagaccactttgccacttaacgatgattccatcaacatcggttgcgattacaggttttgacattcggggaaattcctcaatgcttgtttaaatttggcgacgctatttgcggcaccggtgaaattgaaccagattaaccctggagcgtccgagggttctatatcaattaattctatattataatactcagcagtctttagcatttccctggtgatacgtcgggcaaccatatgaccgaagtgaggattaatagacatcgtcgttagcagcccttaactgagtaattggataaagctcagattctgcatggattgaacgattgccatcaacccaattaacttcataccaaggttcaaccaagtaggctttaattgctggagccgtatcacatacaactccaggaattccatttgctaatcttactgtactgaagatatgatatttcatgcatcaagcctcactgcccattcaggcaattcaaagaaatccggagcatcaatttcatactcaacggtgtgttgtttaacatcagctgacatgatatcaaccattgggtggtttttcaaactgcaagaaaaaataccagctttaggtttaggcacggatacaatcatgttgatttcctcaaaatttagttatgaatttttctttcggcattttagcatttgagccatcaccgtcagaatacccaattggcatagttgcattaatgaattcaattttagcatttataacattaatgctcagagaatctacgccatcaaccatgcgaaattcaggagggcaatacttatcaatgtatgctttcacgccatttttattagcaggtgtaccatcgcgagtatcgctgataatggtttcaacttttttctttcgtgaatcatagaaagctgatacaatcatttcaatttcctcttaaaatggacgaatattaacgtgaaccacagggacagcaaaaggttgcatgattacaacttttgtgtctttagttgcattcaggcgttgtacttttgcaagattaacagcttcttcctttgttaatccgccattgtaggtatcatttcctttatttgatgtccaaacgccccaatcattgcttctatcatcggtcttcggttcaggttcaggttctttgtagacggtttcttcaaaataatgctgaaactcttgattagtaagaatacaccacatgtgagaaaagcgaacttcatctacactaacgcgtttgtattctccatctggcttaatgatttcaaattcaactaatccggtattttccgcatatttaaaggttctggtaattttaatcggattattaccgatttgctcaaaaacacccttgataagagcgcctggagacaagattggagtctttttaagcttatagaatttacctttttccattatcatttcctcaatagtggggccgaagccccgagttagttaaaacttgatttcgtttgaaacgatatcccagattgcttcacgttgttcttcggttgttttacgaccgaggatgtggcgcagataaattttaacaagcagctgacgatttgtgttccaagacggatgtgaagataaatcacgtttacgaacttcatcatggaatccaactttgatttcagaaccgttgaactgaatatccagagtaggaccattttcaaagctgaagaatacgtagttatcttcccagtacatatcgatttgagctactgtaccgttgttgtgttcccaaagcaaagtagtagaaacatcccaagcattgttctgtacgtatttgcggttgaagttagtgaagttcatttttattctccgttgtatctgtttgggtggtacaggtctatagtaaccttgttgaacctagaagtaaacaacttttttcattctgcggaaaataaaaaagggactcccgaaggagtccctgaacttatgctttcggcttaccaaaacgagaagcatcatcgcgaagaaccgcacgagctcgacgcatgattttctcaaccgtctgattgatacgcttgttcgacccacgcttgtagccagcgcgtttagaggtaccaacaacttcttttactgcagtttttgctttagcttgtttagccattttatcatcttccattttggagaaatacatgggagcacgttcttccgaggttcaacttctttcgacagttctttcggttgtagctcccgcaagcccctaagggtacgattaaactcttatctgttgcacaccgttagcttaaaggttccgggtctgatttctcagggataagatatacaccgatggatgtataggccttgaggcgtactcccgattggccatcgcctcggggtagcatgcacttgccgtttatttctagctgcactttggtagcaaatcaccgttggtttcggatgttttacgtggggataaccaacaacgtccacatcatacgttacccatgcgtacacatggtgggcgtacaaattacttcagcgttaccacaaagtggcgaacagctttgcgagcagcagaaccaagatgcttagcatacttcagttcgtccatcgcttctaaagtatcacgaaattcagcttgagctgggttcagatgtttaaaacctttcagaacttccagtgcttctgcatagatatcgattgaagcaccgtagttttcgtgaccggaattccatgcattacgttggagttccagggctttagtaagttgtttgttcattgaaacattcctcaaatgaggttaaaatttggtggacggtaaccgaggtttagctcgggcatccaccgcgtagaattgctcgggtaactaattgtccgacgcccaattcatattattatttatatacgcacgccagggacttataatgacaagtcacaaacttctgccggatttctttaggtttcttcacacctgctgctactaacggatgaggtacatttctgatattaccaacaggcagtggagtcaaatcgcctacctcaacaaatcctttcggtacatcatcaccgatagaatagatttcacacatatccggcagttgtccttgttcttcttttccaagaataataccggaaggagaaacaatttcatcaccttgctgtgcaggttcagatacgagaattacatactcgcctagagctttaattggaagttccatgtgttacctttattgtttgaccatgtagttatattaacatggtcagtttaaagcaaattacttaccgatcatctgcagcagatgctcaactttcataccatttaccgagatcagtttatcaaaggcaaatgagcgccaaccttctttctcggtatcatatactggaagtgaagtagtgctttctgctcgagcagatttagtagtgctttctaccaaatcagatggaataacatctttatcacgagtacagcgcagagtacgaatagtgccatcagctttttcaaacacaatctgggattcgcccatgctcagcacagccttcagagtttcacgaatatggatgttttgttcagtagtcagtttcattttgatgtctctttaatagttttgataattacagatttgcgcttggataattcttttaataatcgaactgcttgatcttcaaatttaaatgttgctaatggtttccatttaaaccaataccggcgttctactgagtatgatataacaacatcaccgcttaggttaagtttattaatttcaacaattctaagtttcattattcaattccacagaattctttaatgttataccaattcaacttatccaaattacgttttggaacattgaacacctcgattccagcagaacgaagaatatcgtcccaaccgggttcgttcttgtcgtatgtttcgcagtatactaattttttaataccagactgagcgatggcttttgcacaatctggacatggagacagtgtgacatacattgttgctccatcaatactactgccgttccgggcagcaaaaagaatagcattaagctcagcatggatttcattgactttagaccatgcagagtgggctgctcgatgttctttgagcaatccgacttttttgacttggaatccgtcttgacgcaatcctgtagatttgtaaggaatttcaccaatccaaccttgttctgctgcatggtcacaacagttcacaccaccagaaggtgaaccgttatagccagtagaaataattcgtccgttcttttcaattactgcgccgactttccacgagcagcattttgactcttgagatacgagatacgcaatttgtagtaccgtcgacgctttcatttaaatcaccagataagttgtgttatttgttttaaccaattttaactcgtcggtaggagaagcaaaactctctactcgagaagtacgaatgcctgtaccatctggaaacggatgatttcctcgttcaataacatcggaaaagacatagccataaagaggctggccttccttaacatcaacgttactgtacaaaatagcatcatattcttcgcgcggaattgaccaaacgccttggtcagaaccaataacagcattaattagacgaataccattttgactaatttctgctttaatgccacgagcatgttcaactaaaagagcttctacagcctcacgtaaagtcattagatatgtcctaaaatgttagtcatttcaacttggcctgttccggttaaagccaattgagtgtgttgattgctctttccattattaactgtaatgatataagcatcaacacagttaaaggatgactctcgtcggagagtcactttacttccaggaacccggtttgctacttcctgtgcgaagattttaaccttcgaaataaattcatcgtgtgaaaatttagcatcagacaacataagtcatgacctgttgggtttcaaaattagcaataattccaacgataaaccaatcgtgttcaccttcgccacaagaaattttaacttcagatgaaccgcctgacctgtcaatagaaaatttaataacttcgccgtttggaataagtgcattcatggcagataaaaactctgcgtgcattttggctacttcagccggagtaaactcatctgttaaatgattagcaacaacttgcgtaaatgatacttttactacttcggaatactttggaaacattatactttcctctaaaaatcaccgtgggctacttgccagcattcaacaccaatacgacgccacatttcaactacctgcgccctgtcatctactgcaagttttacattataacgatcagcaattcggtcccagaagatttcttcttttaccacatcgtctttgcgtgaatcgccttgcttacgttggaagtgttcgcctgtttcgccaacatggtccaacaaccatttcttcgtaatgcgttgataaacagtagggtcttctttagtaccagactctctgccggaaacagtaagaattttatatcctttgttacgaagcattttaagaaattcaattaccatttcctttggatggtctttaccacatttggccaagtcataaggagaacgatgattgttatctgctaacgtgccgtcaaggtcaaagataactgcttttggcaatgattcgtctggaatgtacaaatcatatgggtgcatcttagaataaaagctacgaagcacttcaataggaactgcattcgcgccacgatagaggttacgattaagcaattcagtccaaggaacgtcaaagcgtttaatttcccacttgacaccatcaatttcatatgccaactcttgccacttcttgatagtcgttggattaaggttagtatcagcaatgatgacacctttagtggtttccatctcgagtagagtcttcgccatagaaaactgacatacagatactgacttttcacgaagcttagaatatttgtaatcattacgtttatcaaggccaaagatgccttcacgcaaatcatcacgagacaaaacataccaacctggattagatgctacatattcattagcccaggttgttttgccagagcctggagctccttgtgtcaaaaccaattttttcattatacatccttaagattgtcaataaaatcatgaagagccttagacttttcaccccaattagcacgatatttttctttaattgctcgcaatggcttattcattgacagtatatcatttttgtcataattttcagctgcgcgtccaaacacgatgcacgccaattcattttcagcaattaaccctttaagtgtttcatactgttctcggttcattataataccattttagaaagattgcgatgcgccaatgagcgacgctttccatgtttcttcaaaaaattgttaacttcatcttgctctacaccgccactttctacaaattggagtgccttaccaaattcaattgaggcatcttccaattcagaaattgcttccttcagtgcctctttacgctgaacaaactccaaaaaatcgggatacataaattctgccatgaatagtttaaaccacacatcaaacgaaattcgtgtttggtcattaagctcaaacactctttcttttaaagcgccaggtacactaacacggactgtataaacatatccattagaaatattttctggtacagcaatagctttcttaacaagaggagttaactgacacgacccaacagctagcatattcctaagttgtgtctttttaatcgataaaagatgtgatgcgtcttttacgaagtaagaatgaaggtgtgaaggttccataatattttcctcttatttagtttacttaacgcaacgaggttctttaaggtcagaacgataataacatatcattccattagcatctttagtataacgtaaaatgtcattcatccagatgcgatactcttgagactcttcaaacggcataccaacccaggctttaccgtcaattacttttacttcccaatgtccttcccatttttgaattgggtctggccaatcaggatgcaaaaccgggacatccggtgtactagaagaacatccaacaagtaggctgataatacccatggctaatagacttcgtttcatctggtagcctcctggatatcttctgcaaacttattgaagcttgcattaatctgtttttcaactaacccaggtttagctgcaactacatttccacgcttagaatctttattcattttagcgttggaagtatcacgcgccgctcgattttcctgatagcctttatatgttgtctgcagattttttatagaaacaccgatattttctatttcttttgcttggcgatcagattcgtcttggacgactttgaggtcagctttaagattttctacccgccacgaaagatatttcaatccggcggcggataatgctaacactccaatcatcaaccaagttgtgtttattttgagcatagtttaaggataacctctacgatatcatcacgggataatcccgaaatgaggatgtgacgatcagaactttccgaaggagaacacttgaagcaagcttctacatattctgccatctcagaataattcagctcgcgatgcataatgccaagacgatgcttgccataaatcgggtcaacgattacatagcatttgcatccgttagcatgaacgtttggctgggtgatgttcttgaacacctctgcaccatacttcgcgagatgattatctaggaaatcaatcatttcatctacggcttcaggaagttcttcggcacgctgctcgttcacacgattagtgtactctttttgcttcttacgagcagcttccttgcgcgccatgtgcgtccgtaggtcagtgacaaatcccactttcttggtaccattccacacaaaaattccatcagaatgagtaccatatttgttaacaaccatatctaaagtaattgcttgcatatccatttcaatatcctcatcagtttgtgtaagtttatagtatcacactctgacgaggatgtaaacaactattcttcagaaatttcaatttctttttcgtactcttttggaacatatcctgcccagtacttcaagaacaccctttcgaggtctttaagcagtttatctacatctacagttccttcgtacatgttcatgataacaccaaacaaatggcgctgattaaccgtggctttctgcgcagcaatagcataatctttacgagcacgacctctgtattcatcgtagaacgactgacatagctcaagtgactttccgaggtaatctagataagcttgttcaaacgcagaaattttcttaattgcgtattcatctccagcaaaaagagaacgcaagtcatcagagtttgcagatacaacagacgcaaacaatctttcatttgacgttattgagtctttagtgtgatgaagagcagagtaccattcggttttaaccttaaatctctgcccagtgtttagaactgcaatgtacccttctacgccttcaagttcacgaacaccttcaacccaagtggtggggtcagaaattccgtaagcactgattaaataaggacgaattttagcattagcgtacaaatcatcatacttaacatactcgccggttgcgttatcacggacgtttaacacaaacaactgtggctcctgatatgctaaaacaacacgattattaggtgaaacaaattccatgtttaccgtataaccatctagcgctagctcaagaataacctgatgaagcgaagaatattcttcgctgttaagcaaagctgaagcctgtcttgcctggtcactgtagagagatgtttttgacttaaggtatagatacccatcatcgacataagatgatactagagagccatcagccttatccataatgtattctacatcgctaatatcaattcccatcgttagtgggttttcattcaaattgaagaatttttccatcggacgcgaagcaattcgaattggggtatcgccatccatctcaaacatgataccgcggcactcaagagcatcgggttttaaccactcactgtagcttgcgtagtgatatgaaaacactctgaacttgccatccataggaccagtaaaatctttataaaagaattttgcaacttctgagctttcacacagattcattaaatttttatatagctctaacatttctttaccttatgttgtgtgttccatggaggattgaacttcttaatcagaagtggttcttccaagtccatagtggatattgacatctcgccaagttcattattaatcgaaagattaaaacactgacgagcatagaactctacttttttgccagccattagtgcttcaaaaatcttggcagatttagctgaatcagaggtttggtctttccgattaatagcagttctataataatttatacgtttacgaagatttttagtcttaccaatgtaaactagttcatcatcaactgcgatggcataaactacattcaacttgtttgctatcagaattggtttgatggtaaaatctggttctaactcaagttgaacatattttataaaagaaaactcgttagcaatatcattcataataaagaggggccgaagcccctttccttataagtactttttaaatccaattagaacatcatcagtgacatcattgtcaatctgagctaccagataagaacttatctcaacttcctgaggagcagattggactgcgtcagagttaagatattcgcgaatccaaggaataggatgtcgagttggtgcatcagtaatcggacaaggaagaccacaactacgcatacgagatacagtcagatagtcaatgaagtcatgaagaattttaacgttcagacccggaagaccaccattacggaaaagatgaatagcccagtctttttcttggcggttaacttccatgaagatttcaattgcttcttgttcacactctttagcaatctcaacccattcttcgccatcagtgccagtttgaagttgacgcagaatgtactgtgtgcccttcaaatgaagttgttcatcacgagcaatgaacttcatgattttagcattaccttccatgatttccatatttttatggaagttgaaggtacatgcaaatgatacataaaagcgaatagcttctaatgcgttaataacatgtaagcaaagataaagagatttcattaaatcacgtttagcttctttaatttcgatattatcttgattaaagcagcgatttttggcattttcccatgcgcgagtcttcgctataacatcatcatagtaaacaccaattgactcagcgcgtttcatgattgcttcgtcaagaacgatttcatcaaaaattttagctgggtctacatacaggttacgcatgatatgcgtgtacgaacggctgtgaatagtttcactgaacgtccaagtctggttccaagtatctaggcttgggtcagaaataagtgcagataaaactgctgctggagctcgtccttgaattgaatcaagaagagattggtacttcaagttatcagtaaagatattacgctgatgttctgggagtttttcaaactgaccacggtccatcataacgttaacttcttcaggacgccaaaagaaactcaactgtttttcaatgagttcctcgaatactttatgacgctgaatatcatagcgtgcaattcctagaccagaaccaaagaacatcggctcggtcatgatatctacttgcttggtattaaaaactgtactcattctatttcctattctgtggtgttaaccatccgtggtctaattataattcccttttattaaagcttacaggccgcgcagtcagcagagtcttgaatcatatcatcgttaccggaaccatcacgggtgttatgatagtaaagagtcttaccaccaaagtaccagaaataaagcaagtcgtccatcattaccgacatttcaactttgcctttcgggaaattcgccgggtcgtaataagtattagcagagatgctttggtcaacaaatttctgcataatcagaacttggttcagataaggcttattaccctgtttagcgagctgccaggcgtaatcataaagggaagcattgtgttcaacgtttggaacgacttggttgaagcttccttcttttgattctttaactgacactggtccacgtggtggttcaataccgttggtagagtttgatacctggctagacgattcgcatggcataagcgcagataacgttgaatttcggataccgtatcgcttgaggtcttctcgcaggagttcccagtcacagacatagtttggagctgcgagttggtcaattctttcattgtaccaatcaataggcagttcaccacgtccgtatcgtgtttctttgtaaagcgtgcatggacctttttcgctagcaagtttaacagaggctttgatgagtgcatattgaatacgttccatcatttcatgggtaatatcattagcatctgcgtatgaagcaaagttgcttgctaaccaagctgcatagttagtaatgccaacacctaatgctcggcggtctttagcttttaacgctttgtctactggatagtcttggtaatccaaaaggttatccaaagctcttaccattacttctgcgatttcgttaacttcttcttggtcttgccagttgaagttgtcgagtacgaatgctgcgagtgtacacagcgcgatttcgccatcttcttggccaacatccgaagttggtaacgcaatttcgaggcagaggtttgattgcttaaccgtagccacatcacgaataaaaggaccatattcaccaacgttatctaccatgtacgggtaaattcgagcagtaccagcacgttcagtaaggaacaactcaaacagttcacgagctttaatacgtttctttcttatatctgggttcttttccagttcttcatataatgtacggaacgcttgagcgtcacggaagtattctgtgtacaaagtaccaagacacacatcgggactaaacagagtgatgtaatcattcttaatcaaacgttcaatcatcaggttattaatctgaacaccataatctaaatgacgaatacggttttcatctacacctttgttgttcttaagtacgaggaggttttcaacttccaagtgccagattggatagtacagtgtcgccgcgccaccacggactccaccttgggagcaagatttaactgctgtttggaagtgtttccagaaaggaataactccagtatgtttgacttcaccgaatccaatttttgaaccctctgcgcgaatcattccagcattaataccaatacctgcacgcttactgatgtattttgtaattgatgcagcagcttcgttaattgaattaagactatcaccgccttcaataaccacgcatgaactaaactgacgggtaggagtacgaacaccagacataataggagttggcaacgaaattttcttagtagaaactgcgtcatagaaacgaataacgtttgctaaacgattttcgccatcatcttgatgcaggcacataccgatcagcataaaggcaaactgtggagtttcatacaattcaccagtgtgacggtcttttacgagatatttctcgattaactgcatcgttcccgcataagtcatagtgaaatcacgctcgtgcttaatgtaagaatcaagcaaagtaatttcttccgcagaccacttactcagaatttctttatcatacttatttgcattaacacaccgggaaatgtggtcaataaaggcaggtggttcaaactgtccataaacacgtttacggatttcaaacatcgctgcattggatgctacatattgataatccggttcatcaatagaaatgctattcgccgctaccttaacgatagtcttttggatatctgcagtgctcataccatcacgcagatgggatttaataatttcatacagctcgtatgggtctactttagttccttcgcatgcccattcgaggactttaatgattttctgcatgtcaaattcttgactaacacctgagctcttaattacttgcataagtcctctaattcaaatgtatctttaaaaagtttattcactacaagagctattatatcaccatggcaaggaagcggtttgcaggtgcatcctaatctcattcctcttaaagtttctaagtgctctcgctttatttctccgttccgaatcttagcaataaaatcgtccttaaatgccgcaatagcatcaggacgattatcgcaatctttgccgacgtaatttccccacattgttccgcgttggatatttacatcgaagtcggaatggtatttattaaccacccgacatatcttcatgttatatcaacttcaaaccaacagattaattgtgttttgcctatagaccattcatatgatttaacaatagacagaaccctttgttcgatcccgtcaaaaactatcttgtcattaacttcaggcaaatcgctagagaatgcatcacacatctcgcctaatattgtttgtcctttacgaataaatcgaatattcatacagccattttccccttaattgttgggtgagattcatatccaactaattcaaagtggtgtggacgtgcaaactgctctaaccaacgaacctgagaaccagtctgccatgtttcatacgtatccggaaatgctattttaagttcgcataactctttaggttctcggcggagaatttctttgcattgctcaatgtgattcatgtaaatgtgagtattaccaccagtgaataccaaatgaccaggtttaagattggtcattttagcaataacatgaatcaatgcagcatacgaagcaatgttaaatggaagacccaagaacacatcaacagaacgctgataccactgaaggtctaaatatccattgcgaacgttgaactgatacatcatatgacacggtggcaatgccatccggtttaaatcaactgggttccaagcagtcacaatctgacggcgatcagttggcaattgcttaatacggtcaataaccaatttcaattggtcaacacccatgaaatcacgccactgtttgccgtacaccggacctagttcaccaccagaatatcccatgtcttttgcctggttttcatagttgtcgtcccagacagttttaccttctagtaatgaaccatgctgaataagacgcaattcatggacattagtagacccacgcaagaaccaaatcagctctgcaatgcatgctttccatgcaagacgcttagtagttacagcaggaaatcctttttgtaaatcaaaccgaagctgggtaccaaactttgcgatagtaccggtaccagtacggtcatcagtctcgtatccattttcaaaaatatctttaattaattcttggtattcacgcattaaatttttcctgaagaggtgtaaagaaaagctggtctccacgcttttcaaatcgtccaataatagacactacatcatctttgaccatcacatttccatgtgacattccgatgaacatcttcttataatcacgttcaatttcaataggtatatttccatttcggttatatactgtagttgaaccgttataagtgctaagaccattataactaaaaactagaagatgaataccatgcttaaatggaaatcctttccatttcttttggactttgtcttctgatagctgagtgatatcatagtttgcgctcatagaccacctctgaaatgttagtcacttcatcaatatgataccaacgattttcaataactttaaacccagagttttcataggtcggagctaccacaaattcaataggtagagtgacatcagaattcactctatgactttttctgatgattgtttgtataacattatctgcatatggatatgccttctggatgattccggcaccgcctatgatagaataattaaggtctctattaaaagtgatagtactgttgtaagaagtatgagcggccataatgtcaccacccaagaaaccgataaattcttcttcactaacatacgcgtcagcaaaaaatccgtttttagcagttgccaacgcacgactcatgtcttggacaacgattgtcttacgaccaggaagaggtttaggaaaactcatgaaagtctttgctccgcaaatcaagatagtatctcgagtacgattagcaaagtttttcatatcctgggaaatatgtttccaaggaagaccatcgcctaaaccaaaagcattttcgtttttgccatctacagtttttgtaggagcaaaggcataaactatttgaatcatttaaacctcagcaaaattcaactcattccacacttaaaacaccggccacctaattgccatatgctaccaccacagtacttacaatcccagtcagttaaaatccacatgacttgtacccactagctttaatcatactctgaagagttttaaatccttcttttatggcttctgaaatttcctcaaatacttcctttttcagaatgtacaacgaacccgcttgattgccagaaagagctgaaataatcacctggtcattaattaaaaactcgccatatgctgaatcaattttacctgaaacttgattgcctcgggaatgagggtcaaatacgagctcaatatgagttactccaggaatttcatcaaactggcagcgaatattaacgcgaggatatcccattacactaaatttagacatataaaaataatcctaatataacgccgctaataaaagcggcagtaacagaaattaacaaaactactaattcagcctcaatcatttcttggccttagcaagtttaaatgcttttttgaattcttcaacatcttcaacaggaatccagaagcctgagccatacccatcttcatagcatgggcagttatcacagtaatcattccaatagacagtttcaccacccatagtgaatggagcttccatttggcacagtacttcttcaacacgctctaattcttctgggtttttatcacaaatgcagaaattccatttaccatgatattcagaaccaagtttgatgctttgacgttgaagtttcatttttattctccagtagattatggagctatactatcacaagcatagctccttgtaaactactttttgaaaacttttttgatcaagtcaatcatttcttctgcattttctggggtaacgatcaagtccaagcgagtaggaccaggtttgattgcactaccaatttcatatactggttcgaagtatttgaattcataatcagcgatttcaaagtatgcgtctccaaatccttcggcatcagcagttgttccatctttaaattttacttctgtgatgaaactattatcttcgtcgagcattttagtaggaaagaacgaaccaccgtgttcttcaatcatcaagcgcatacgacgatttccgctagatgaaaggtcccactcggcagcaagacttgggataatgcgatattctgtgttcagtttcataatttacccgctaaaagtcgttaatgtatcttcacggcattcatcatccatgccaggaaaatattcttgttcaagccataaccatagagtaggagtatcaccttctacagtgatttcgtttcctccccatggggcagacttgttactaacttcaatcaaaccgtatttttcaatggtttcaatgaagtgttcataatcatatatttctacagtaacctgtgccattatcatttcctcaaagtggggaccgaagtccccaaaggtaattactctttccagtcttccatcatcaaatcaatatcttcccacccgtttgcttctaaccaagcacgaactgcttctttagaaccacggaggtcaatatttggccaaccgccaccagggccttctttaataactaaatcaaaatcaataccatggtcagtgtcataaaaacgtgaaccatcttcaaaaatcaaatcagtacaaaatcctgatttattgatgtaaggttctgccacgatatcaatgtttaatttacccatgatgttttcctctactcgttttgtttcgatgtagatatagtatcactcatcaactggcttgtaaacaattttgtgaaaatatttttggagggataaagaaaaagggacccgaaggtccctttatattagaggtcgttcagaatatcattcagatcgtcatcgccaacactgtcaccagcatcgcccatgatatcgtctgcggaacgagaagaggtcggtttggattcaaaatcagacaggtctttgtcaaaggaatccaggtcatcaccaattttatcggcttgagctgctgcttttgccgcggcaccaccaagagctgctgtacccataatctgtttaaatttggcttcgttaacttcaaacgatttaaactgagatggagccacaatttcgctgaggtcagccatattttcggtcaggaatttctgagtttcttcatcattgatgtttgcaatctcggactgaccaaggaatttacattcatcatagttctggaaaccaccgactttcttaactttcatgacgaagtttgcaccttcatacacacaagttacatcaaccggagtttcacccatatcaacatcgacttcaaccatcgcgttgattttgtccataattttctgaccgaaacggaatttgaatactttaccttcgttttctgggttagccgggtctttaataaccaggatgttagaccagaaagaggttttacgtttcagaagcttatattcagccgggttgttgttataagaatcgtttttgctcagatgagcacaaaccgggcaagaatcaaaatcaccgtgggtagaagtacaattttcgatgtaccatttaccgccgtgtttgaaaccgtgattgattagttttacaaacggcagagagttttcatctttaccaggcaggaagcgaattactgcttgaccattaccagcattatcggtcttcagtttccattcgtttttgtcttcgttagagaaagaagaaccacctttcagaccagccagttgttgttgaagttgagcaggattttttcttttaaacatgagttatttcgccttaatttatttaaacagttgttgttgcaacatgggtccttgcaactggacgatagattaattatatactaatttctttacaagatttgattatgctaataaagagtttcttagcttcagcaccgtcaacgtttaaaagttttttataagcttttaatttagtagagtaattactccaaactaagttatccgttgcagtatcatgtgtatttattatatctaaaaacgagtcaagcatgatgaatgtctcgaaagatataacgtttgactgcagaagtttgaacacataagatgttccgactttctcattatattcaaaaatatcatgaagcttatctacattaactttcttggcaaaatagtaaatgttctttacatcttccgagaacgttgttttaatctgcttcaatttacctatatattcacgataaaacacgagggcatcagcatcactgatatcgccaatccatgcatcttggttagctacgaggttactcatgaatatcagtgttaactcttttaatgtatatttctcagcgagtttctcaaagaaatatttgtctctacgcttttgataagctttatcagagacccgcataacccagttatacttaacaacgtcatatcgaccggcaaagtgttgtttgagcattaaatataaaagataaacgctcttaccgttaacgtatctgttattatttccaggcatgcggagacgaatcataataaaaagtccagactattcgttttgtgtgtttgactaaatgatggacgaagcatattttcttccaatgcttctgacataattttttctatgattgctggaggaatatatctattgaagtttccctcaggaatagaattttcttctaaccactgagttgttgcttcaagataccccattccaagttctgttaccatagattcgatagcaaatccattagcttgcttatctagcagctggttaatggattcggagggggacacatccccctcatctttaagcgaaaatagagtcataagcttctaccacttcgtccttttcagtttcataacgatcgcgtgtacctttatggaacagggcaagcagctgattaaataatttgccttctacaccaagctctttcttggcgcggtctttaatgtctttgttaagctcaagatagctttctgctttcaacttattacctgaggcttctttaatcatatctcgcagagcctgtccgtgtactgcttcatcaaatactacttgctctttttctttcttagccattatattcaccttaaaagttattaatttctttcattaatttagacagaccggatttaacaaagtagctataaattttaccacgacccggtagttgatagttattataacaatctaaaatgttagcaacaatgtcttcacggatgtaatcaaaatcgattaacacacgattttctaagaaacgcttatactgttcttcggtaagcaaatctttgatgttttcgccagcatcaagacattcttcaacaaacgtcattttcgttgaaggagtacgctcaccatcaacatgagtgtaccaaaaatctgaacgaactttaatagaagcgacgttatctttcttgtcacctttaataattttaaccatacaatctaaagcaggagaacccgttttagatttcaccaatttcttctgcattggtgaccattgcttaacattaggatacttatgcaattgagtaaagtcaccatcagaagaaacaatcataacaggatgaccttcgagactgaactttttggttaataccgcaatactatcatcggcttcagctttatcaatgtcaatgacataataaggcatatactgcttaaattcatcaattacagtacgaagaccttcaaagtaaccttcccaatcccaatttgattcttcgcgggctttagcacggttctttttatagtaatatgctacatcccggcgccagtatccattgattgcattatcaacacaaatgacaatttttatgtatccgtccttcttccacttaaaagcattaaattttaaagtagaaagaataagatgacgaaccataggagtggttagtttatcgccttctttatacgtatgaagaattgtcgccattgcgatttgcgacaagtcaatcagaatgacaccttcttttacttggtcttcttcggcgaataagcaatttaaatcagacatttgaacctcgttcaattagttagtacagccattataaatacttctataatgaagcataacccccataggagactctatgagcgatttactgaaacaacatttccgtgcaacgaacggcttggacgcaggcggaaataaagttataaatgtggcactagctgaccgcaacgttaaaaccgacggcgtctccgtcgagtacgttattcaagaaaacactatccaaaaatatgacccgacgcgtgggtatctcactgattttgctgtgacttatggacgtcgtatctggattgcaaataaagatattccaaagcctgctggaaattttaaccaggcgaattggacttctttacgtgttgacccgaactggatttataccgtccgtaaaggagagtttgaaattcaatctggtcagttcatcaacgttgactctaacgctgcaggtaatgctacattactgcttccgttagcaccagatgaaggcgataccatcgtagttcgtgatattggcgggcgtcctggctataacggaatcttaattaaagcgcaaaatactggcgcgtctatcgtatttggtgaatcgcgtctacgtgaggtaagacttacacgtccgtattcacaaattatgcttacgtttagtaatggtgcatggcgtgcaagtttaaccgattttggcgatactgctaaaatggtagttccgaacgggattgttccaactcaggtacagtcaggtgataacgtagttcgtcgttatacttccaactcagagatttttattactctgccgttgttcgctaattcaaacgatatcatcaattttactgaccttgacggtacatcgccaattaaccatatgactgtgcgtacgtttgacccaactatctcaattgggactcctggacaaacagaggttcaagtacgtacttcaggtaatgggtttttggtatatgattcgattgacaaaatctggcgtatctttgaaaatgatttacgcacccgagtaagaataattacttctgacgttactttaatgcctaatgagcatatttctgtatttggcgcagataacaataccgttaaaacaattaacattactttacctactgacgtagctgttggggatactgtcaaaatcgcaatgaattatatgcgtaaaggacagactgtagtaattaaagcatctggtggtgatactatcgctagcaatttgaatttactgcaatttccaaaacgctcagagtatccacctgatgcagcatgggtgcaatcaagctcgattacctttaacggaactacgtcgtatgttcctgttcttggacttgcgtatattgaagaaaaagcaaccggaaaaagctattggattgtaactgaatctgatcctaccgtagaacgtgttgatgctaaagacaacacaactagagctcgattaggtgttattgctcttgctacacaggctcaagctaacgcggagtcaagtccagaaaaagaattagcaattactccagaaaccttaaacggacgtcgttctactgaaactcagactggtatagcaagaattgcaacttccagcgaagttaatcaatcaacaactgcttcttacttggataacgtaatagttactcctaaaaagcttaacgaaaggtctgctactgaaacccgtagaggtttagctgaaattgcgtctaacgctaaaatggatgaaggaacagacgattttacaattgttactcctaagaagttgctttatcgtactacatcggattcgcggttaggtgttattcaattagtaaaaactggcggtgctcctaatacagctgctgatcgttcttctgccggcaccggtatattcgatcattctgattacaaaaatgcagttactccaaaaactcttcgcgagtataaagctactgtaaatcagtcaggaatagtttggttagcaagtgatagtgaagttagaaacggaactccttctgcttcaaatattcctacggttgttacaccggaagctttgcataaaaaagttgctactgatggagaaattggattaatccaaatagctacacaaactgaagttaatgctggcggcgtgactaataaagcagttacacctaaaacattaaatgaccgtacagcaactaacgatcgtactggtattgctcgcttcgcgacacctggtgcccagggtgaatttgaagctggtacttcaagtacagtaatggtaaaccctaaattattatttgataaatttgctaatactgatcgtatccaagttaatactagttctggcttaactattactgggaacctctgggaccattataccatcaacatacaggaagcaagtacttctcaaagaggtacaaccactcttgcaactgctgctgaggttataaccggcaccgacgccaagaaaatagttacttctgccacgttgcacgcgaaaacagcaaccgaaggagctatcggtcttgctcagtatgctacacaggcacaagttgatgcaggcacattaagtgatagaattgtttctcctgcttacttgaaacagactattcaggtaacagagtcgtggcaagctacagacagcgttagagggaccgtgaggctatctacaggcgatggaacgtggaaaggtaatgataccgatggctcaactcttccggataacgggtatgcctctaagggcgtcgcagtgtctccatatgaattgaacctcacgttgaaacattacttacctcgtcttggtaaagcctatgacaccggaatgctaggtggtcaaaccccagacaaatatgctcgtcgcgatatagcgcagactatttctggagcttggtcatttagtcaggacacttcatttagcaataatatttctgttcagaatattatatatgctaatggtggtgaagttaaaatttcaccaactgctgacactggcatcgtgcatgttcgttttcagaatagagatggaagcgagcgtggtataatttatgctgagcctcaaacagcttcagccggaaacttaaaagttcgcgtaaaaaacggaacaggaactactgctgcaagccagacctacacatttggtggaaacggtacactagatgttcctaatgaagtatcaactaaaactctgaggtcttctggaaatgcaatagttggcggaactgtaatggttaaggacgtccagatgcttgctgtcgagggattgaattcaatattcggtgaccaatcacagtccgcatttattcgttcccgtgacgctgatacacaaatttttgcacaggattcaactggatcgtatccaattttaactaccaaaaactacgcaagattagctgatggccgttatgtcaagaaagctggtgatacaatgaccggcaatcttaacataaatggttcggctatcgtcattacgggttctgaatcctggtatgtgccaacgaatgaaactgtaataagacaaggttcttggactgctgaaattaaagacgctactaaattacaaggtcttcgtggttatatggttccgatcagaacaccgattgaccctgctaacccaagcactttagtagtgaccggatatgaagaaaaaactgcagctggtggtgttttaactcaggttggtgtaactacaaacaatacttatcaactttggacgccttatcctccgacaaccgaaactgctgataagcgtttcgcgcatactgtgtggatgaggatttataatccaaaccttaataagtttgatgattggatgcgagtgttcacgtctgctactcctccgactgcagctgatattggtgctccgagctcagtatcaactcaggttaaaacccttgaagtcctggaatggattaagcttggcccagttaaaatctggccagaccgtccaaaccaaactctcaaatttgaatgggtaggtgattaatggctgaaccaattttaatggcagcctttggtgaggatttcgtggaaacacgaatcctctctgaggcaaactctgtgaagtattggctaaaagcttatgctacacattctaatgctgttccgaataagccagaactgaatattaacggtgcctttgatatgacctcctccttacggagggggattaacgttgttcaagttaatggtgacagttttattaactttaaaacatttgacgttaccactgatgacaacaacgctaataacaaagcgtttgtagaatatgcaaatggattaacttcaggattgtatattataatgacacatgaacgatttcaatccagtccgttgatagatagatggtttaaaaacaagtggtctgcttcttggccaggttctgacttttccaaatcatttccaaactctgcctatgttggagtgctcggatcagcaaaaggacgtatattaattgagtcattttacggaaatgatggtgtagttaaagaagattccagagctaaagtcgatacagtgtatgataacgttggcgatgtaggatatacaggctgcccttatcgttccattgaagacactaatgagtactcggattctactggatatgaatataagcgatatccagttcaaaatgaatctataagcaaaatcgctgattatggattatctcccggggattcggtgtttttagtgtgtgatatgtatgcatctaaaagccttcttgatgcaggttctactactagggctaacttgagatggttcaaaggtacatctttattatcttcaagcgtatcattagaaattccaaaaaatggagctgatagatggctaagatttgaaagatttaccgctgttcctacagacgctgatggatttactattgtggtatcacgatatccaaaaacgtccgtagttggtgattctaaaatcaaaaaccttgtatttgttcaaaccgcacacagcgaaaaacttaacagtgttgttcaagaatttggcgtgaatggcgtaagaatgaataaaggcgttgaaggaggaaccactatgattatggaacttccaaattcaaaagtcgatccgagcggtgttattccagttcaatcgttcagagaaacatcagactaaggaagccttcgggcttccttttttcgtataaatagaaaatatataagaggataaactatggccgatttaaaagcaggttcaacagttggcggaaatcctatttggcacgcaggtacttttcctcttgtgccggcaggaaactccctaacttatagaggtaaaaaggtttatactgagatagataaacctaaagcagatgataacgactttgtgtcaaaagctcgtggtggcgagtatgctaaaaatgttcattttgtagaaggcttaagccttaatgctcgcggcgggtcagctgagtttataccaggtccaggagatggggctgattataccacagttaacgcaaaaatacaaacatggtatggattaggatttggggcttcatatggtactgaaggtgtaactatcgtctttaatttacgcaatggcgatattaaaactaaaggtaacattactgtagattctggcaggttcgttatagcaggtcaagcacctaccgataatgctcacttaacaaataagaaatatgttgacgatagaataaatactgttagcaacgtagctaacgcagcagttagaaaagccggcgataccatgacaggtgtacttagagccgaagctggcgtagttatagtaaatgcagcaacatccggtgaatatgctcctagactagatcaggttatttcacgcggggtaacaatagattttggcacatactaagaggtagccatggccgatcaaaacttaaaacaaatacaatttaaaagaactagcacagagaataaagcaccaggtgcagatatcgtagcccgtggcgaaatcgcgttgaatacacatgggcgtactctcgctatctataccaaagatgaagctgataatgttgttcagcttgctggtaaaggggttcctttcttagatacatctggaactcttagcgttgatggaactactacattaaaagacaacgtaactatttctccgaataaagcaattagttttgaaactactgatttgagcggtgaaataactcgtcatatcgttggcaaatgcgctactaatgatggttggtacattggtgccggtggtacaagcaataatggtattcttgaaatcggtactattgacgatggtactgaaacaatccagtttgtacaacgcggagccggcaacgtcgaagcccgaaaacttgtcttacttgatggttctggtaatactactcttcctggcgatttgagattaactactaataagaccgtaaaaattaacaatggaagcacgcttgtccttgaaatgggtgtaggctctaacgacgtctatattaaaaaccaacgaggtgtaggtgttcttcaattaactaatgacagtaatctgacattcagaaattcacaggtttattacgccatgaacggaagaggtcctggtaaatccggtactcttctgacgaatgtagaaaacaaccgtcaggcatggcaatacgtaatttctgctgcaaccgctggaactccacgttgggttaaagtagctacaattaaacacccaggagatgcatcttcacagttagatttaatgattactggtggtattgattctgggcacggtagacattacgttgattttatcacgttatctggtcgcaatttaacatcttggagcactaacaatttagataactgggttgaatggcgcaggattggttctccttctaaaggaaacgttccagaatattacgttgttaaaaatgatgccgctactgatgcggatgcttcatttgatttttacgctaaagttcctcgatacagcaatgggctttatgttacagtgctaaacacagctggatacaacggccaagattcaggtacagtaattatctatgaaaccaatcaggacactggtgatactggaccgtccggaagtattcttgtttcaatgaaacagatttttgatagtttagcaaaaccagatttcggcgatactacgggtactcttccagttaaccgtggcggtacaggtgctactagcgtaggagcagctcgaaataacttaggtttaggtactgctgctgttcgggatgttggtgaatctgctggtaaccttttagaaaatggcgcttatggattaggtggtaacggtggtaaatccatcaacgatattatctctaacgcggatatgctgacacggttaaaagcatatggtggtactttctggcgaggtgttactaaatctggtgttagcgttcaaaacggtctttatagccacggctccggtatttttatgaatgctggtgataccatgtcagctattaatatcgactacgctagtgctaaagttcgtgtatatgcagctaacaacagtgatcttgccgcaggaaatgttaactacaatgagctttatggtacagcaaacaaaccatctaaggctgatgtcggacttggcaatctgacaaacgatacccaagtcaagaaagctggcgacaccatgactggtgatttaactgttcctaatttacacgcttccggtccgggtactgcatcagtatatgttaatgcaggaagcggaaatgctcatgtatggtttagaacaggaggtaatgagcgtggtgtaatttgggcaactccgaatacagcggacttgggtcagattaatattcgtgcaaaaactactggtgatgtttctgccggtgattttagcttccgttctgacggccgacttgatgttcctgtagcagttaaagttggtggagcagcaattctaaccaaagacgggaatattacctctggttcgatgtttggtggtaaccttaacaactatttgacctctattaaaaatgatatcaccactggtgatagtaagcaagtaagcaagaccggtgatactatgaccggtaacttgactattaacgctaacttaaaagtcgaaaaccctaatggatcaatggttgatttaggttcagagaactcagataagtatagcagattgacccttgcacgtaaagttggctctggcgcttccgtagcaatgcttaaaattactcctgaaggatacgtgcaatttggttatcaaactgcggtttctaatccagctcctagtaaatatattctagttaaatctagcggccttgaggtagaaggggacttggtttttaatcagacatatagcggtactgaagatgcaattaatattactgataagactaatgaccttaacaacatggttattaaaggcagtgatttaggtactcgtctattatacaagtgtacttctattggtggttgttctaatatatcgaacaaacctacctctgacggcaactttgttcttgaagttctatctttgcgtaaaatttctgataccgattggacatgtaagcagacctttactacaaagaacggtaatgttgaaggtacatatgttcgatactgtcaaaacggtacatggtctgcatggaaagaggttgttgctggtgttcaaccgattaatttaggtggtactggagcaacttctgtagctgctgctcgtaataatcttggtgttggtgaatggcaatctgtggcatttggtgtattgaatgtcaacggcgttagtaatgcagacccggccatcacatttaaaaatggggctgtggttcgtgaagcacaaggtggtagtctcggcgcgttaatcctgtcggcttctactacatctccagacggcgcgaaatatattgcttttcgacccttcggtgattcgtctggtactgagattagagtaaaagccaatgagtcaagtgatccattacttgagtggtcttatggcccgggtattcgttcaaattcatctggcgcttttgttatctacgcaaaaacaggtcaggcactccatttaagaccaaacggtgataattctaaccaagccacagttattgaccaaaacggtaaaatgacagtcggcggtgagttcgaggcccagaactcaaaaatcacaggcaacttgaacgtctctgaagataacagaatgatcgttcttggcagaaataccgatattggtttagtcaagaaaagtaatatgccaggaaaaatggctatcagtaaatctaactcgtttactgttatggtgtcaaccaataccaataatcagattaatcctgctgatacgtttaatgatatattcaaagtagatgctgatggaaaccagactgtttacggaaatgcccaagtcaacagacagttaactgtttctaattcagctactgttgcaggtgttattaatgctaacggcggtattattgttcctactaccaagtatgtgcaaattgccgatgctcctacgcagaataaccaagccaccaacaagaaatatgttgatgataaggttgcttctgctattagtaatgctggcgacacgtatcttccgttagcgggtggtactgtaactggtaaattaatagttacgggtgatcaactgaaaactacttctttgtgggctactggagacgctgctgttaatggtgctttaactgttgacggtaatgttgttagtaattacggtattggtagctttgttggtgctgtcgatgttaaggcccctgccgcagataatggtacaacccacctttggttccgacattctaacggtggtgagcgtggtgtgatttatatgccgcgtgacaataataccatgatgggattaagagccggtggaagtgaatggcaattacatggctctgcaggccaaatggtagggccaggcgcacgctggagaattcatcctgatggcaacatacagggtgatgtttatggtggttatatcactaactatatcaacgataggtttaaccaatgtgctcaatgggttcgtactggtgctcaacaagactttggcccaattggtcgaccggcacctggtaaaactgttcctgctggttgggtacttgttggtcttaacggtaacagcaacgaagctaaccagaacatgcaacttatcggcggacggttacaagtatggaaaccgggcgttcaatgggttgattctgctacttgataataagggggcttcgacccctttaaacttaaaggtaaaataatgattgttaaacaaatgaaaggtattaaatggcatcacaattttgaaggtggtgcttactatcgagattgtaatgataagtgttggtattcttttagaaactctcttgataaaaattcccatattattatcgttgatgctaaaacaaataagataattaattactacaacggtgaagatcctactatgataggtttgtttgctgataaagaaatgattttggatgtatatcagctcgacgattttcctgttgattcgtgggatgaattcacacaaagagaatttgaatttgtagacgaacaagttgtgatgaccaaagatgtacaagttcctaaagaaagaactaaagatgatatcatgaaagatttaatgaagcttaaagctgaattggaatcattgcaataaatagctctgtaaggagagcaatatggcaagcaaacaatcaataccgttttttgatatgtttcttgggttgctcgagctattattcaaagatggagccacgggaagagttctcttttcccgtgttttcgttgtcgtacttttagcattgttggcgtttgctggatataagtctgatagtcttattacagcttacgtcgacagtacttatgacaagtatgataaactggttcaaaaggatagagattcccgatttgataatacagcactcgaacaactccagatagtacatatctcaagcggtgcagacttttctgcggtctttacgttcagacctaaaaacttgaactacttcgtagacttaattgcttatgaggggactttacctagcacggtagattctaaaaacttgggaggatatccaatcgacaaaacaactgctgaatatagcacgcatttatcgggtagatatttttggacggataaggaatttgttttcttaccaacaaaaagaaaaccgcctgaaatatcgtatatgtttagctgtccgtatttcaatttagacaatgtttatgctgggactgttgaaatgtactggtacaattccaaacctgcattatctaacgaaagactaacatcgatatgtggtcaggcggttagagctcttggaagagctaagtgattacttattactatgcatagccattgttcgatagatagactcaaatccctcgttgtattcttcaacgagaattctcttctcttcgtcagttaactcagaaaccattttacgaaagttgctctgatttaactgacgcccctgctcattcttgattccaatttcattcaagaacgcaataaattcatctcgcttctccatgatatgttcagcattgaacttagtcagaatagaagcaacagtaacgatttcttggacaatttcaaacttagtcattatttttcctacaacttaacggattatgtggattatagtatcatcttgataccgcgttgtaaaccggtttatgccaattcccaacgagaattcaaatcttccttggtagtgatatactcagcaccagaggacatccagagcccgtagcgaccatcttttactctagccgttaaataccattcctttccaattggacgaaccctacgattcaaccggtgacatacgtcaattgcctcctgaaaagacaagtcaatcagacttccaagcgcgattttattcattaacgcttcaagatatctttgtgattcaacgacagattctaagttatgactcatgctaaaactacctctccacgattacctaaaatgctttcgatatactcaactccacttataatgtcacctctatcctttgctttaatagtaataattccatacgtgtaaaagtcggctgacaaactgaatggcttagaagtgtcctggttaaacgtagacattactgcttgctctaaatgttttacttctaagtcattagcccaagagttaagaactttaagcctaacttgtaaagtatattctactttaattgctgaaagtaattcaacacgtttatgatatgccctggcttcatcttctctgggtaaagtttcagtattcatagataatctccaatatcataagcatcaacgcatttctgaaattgttcaagaacttcttcaggttcaacgttagcgataatagctacagtaaaggtaccattattccaatcatgtaccatccagtccccatatcctgcactctggaggtcttccattagttcagaatggatatctgctactaatccagaatggtcccctaatttcttatggagagcttctaggtcatcacaaataatagttaaagtagtacatttggaattattcagaatgcgcattgtctttacctttatgtttttgcttacgttttgattctttggcagcccgctttttatctttgtgtgctccgcctttattaaaatcatgtttagctactagattttgcaccttcaagttccttgatgtaatagtcaatatctttaatcatttcttctgtcattactttgtacatttcagcaagaaatggtttagcgccgccattaaatggatgactaaacggacagatgtattccttatccatgagagttttcatgaatttgctatctgccattttaaacccggcttcattggtatatgtaccccaattatcgtccatcatttctaatgagcgctgaagcgatttacgttgaatttttaaaagtataatgttattctttaatgtactaatcattagtataaatcctctgagaataattcgttggcgggtcctgatttaggacgaactgtattaacttgacctgcatgtgtagcgatgattaatgcttcttcacgtgtaaagtactcaccccactggtcaacaaatccttgattgtctccatgaacatggtcagaaaccaatttgttgcggaacatatctagaacgttcgccatatcaacagaataatggcgagtgcctggaaccacaattgttccaccagttttcaattcaaaacgatttgctgcacaaacgatacgacgttgaagtaatcgtccatccaaccaatcagctactttaaagcagatttctggaatttcgctatttacattacacatttgaccaacttctcgttgaaagttttaataacttcacggccatggtctgcacctttcttacagtctgcaattgtccatgcttcaccgttttggtatttgtgaagagcccgggtattaatatctttcacaagattcataatcaaatcattaatttcttgttcagtcatttaaagaatcctttaattttctgccacaaacttttcttttcacgaataccaatctgacgaataacaggttcaccctgcattttctctaaccattccattgagttaacagcttccgctaatggaacaaatttagcaagggccttttggtaattatctacatccatgatatgtttaccatctgcattgtagatagcatagcattttgtgaatttcttatcaatgtatccgataaagtgtccacggaaccatacatcccaacaatcagttggcatattcagattaaggtcaaccttttctacacaacgctgaagttcattcaatactttaaacttgttcattacagttccttaatagagcggatgatggtttcaatgttttcagcagtacgggcgatatctaagtaagtattgcctgttgcagctacacggcaagacattccgaggtcagtgaagtgtttctgatgctcttcagaaatcttgtaaccgaagatgcggaaagtacctttgttgttaacttcaagactacgaataccgaaggtacgtttttccagaactgcgatatagttactgcggtaaacagtcagttctttcaaaggcaagatatcttccatctcaccgagaagtttcatcatcaggtctttgtgctcattcatatcttcagttagaggacgagctttacgagtattgcgtttcttcagaagttcaggcttgttctcttctgcatagataactgccgctttagagatgatgtcttgtgcttcaccagtgatgattaaaccgtcaccagatttctcgatgagacctttcttaatcagaacaccgatgtttgagttaacagaacttgcgttcatggtttcttcaaggatttcacgcagttcagaagaagtgatgaaatcctttttagctacctgaaccaggatagcagcagttttttcgttcagagcatcttcggaagctttgatgatgtaagttactttagacattgtgattctccattctattttgttcaatttgtttggtatgagactataatatcatctgctaaccagcttgtaaacaactttgtgaaaataatttggggcattctaaggagggattttggagggatatagatttatatggaaggacctggagatgacctccaggttcactagattaactgaggagcaataaaactagaccaaatacagcaattacagaacctataattaaataaaattctatcataattcttccaggtctttcagatactcagcttcaggagttgtcttttcccagtacttaacctcttgtgctagacgttttgcttcctgagcaagtttcttcgcttcatcatcagtgatgtgatagatgttcattgaaacaagtttttcagaatggtctttgaatagttcattctgttcaatttctttagtcagttgcttgcgagttttaccttggataacgatgttacctgcgataacctctttgataaattgagcttttgcctgagcaagattaaacgcctgcttagtttcagcgattttatgctcgattcgtttggcagtgaatgtcttacggacttctacgaaatgacgaattaactcacctgaagttttgaacttatcgtttagtttaccgttctcgtcgatgactactatgtactggctcattttctcaatgagtttaaaatccttcatgattttagcatgacgctgctcagggtcatcgcttaaagcatagtctttacggaatttaaccttaaagccaaagccagtcttagaacagtcatcatcatatgtgatgtatcctgcatcttccagaggatcgagtactttctctacataagaagcacgttcaaacttgtatggaatttcgctgatatagatcgagttccgtgaagtttctttatacacaccgtgtagttcaacagaaccgtcttcagtttgaacgatttttccgttaaatttagggaactgaacttcaggttccatcatttcgccacgaagtgctgctttagtgcattccaaaacagattcaaaactatgcggaagaatagaagttgaataacctgttgcaataccgcgaacaccatttagaagaacagtcggaattaccggcagataatacgcgggcggaacatgttctttatctttatgtgctggagcgatttccgtatctttgtagattttacggaagttgtcagaaatccgacagaaaatataacgacttgccgcagcagattgaaccagacgcgaaccgaagttgccttgcccatctaacagaggatagttgttattccatgtgtttgccatcaatgcaccagcatcttgagcagaggtttcaccatgatgataacctaaatcagctacaccgccagcaacagacgcaagtttgtggaatttttctttattaccacgagccaaatcaagggcacgagcaataacaaaacgctgtacaggtttaaacccatcaatcaagtttggaatagcgcgattttctacagtataaatcgcgtattcttttgcttcattatcaatgatagatttcaaatcgcgatgacgaagatttgatgccttagccaaatcatcaatagaacctgcttgctttaatagagtgtcaaaaatatccattgtacctaccagattagtgagccgatttgtactataacatcggaaatgaaaagcacaatataaatcattccgtaaatcattccatagtacataactaatagaaaggcggcagcaatagctgccacaattaggagtttcttaatcatttgtaaactcctacaattttacaaatgcgctcaaacataataaatgctgcggtgaacgcaatacttccgattactttagtggtaggcacgaggccataccacatgaatgttcctgagcaaatcattagggccatcagaaacacatagcccatcacgaagaaggttctcattagtatttctgcaaagtaaagatgaagttatcattcagaatacgattcagctcagagtaggtctgcgcgtcacttgaatgctgacgagtaaacgccaatgcaagctgacctttgccataaccggtggtcagcggtttcattttattggcaggaatccagaacacaccgtaggtcatgcaattcgagcgcagagtacgacccaactgagaacgtccagaacggatatgagaaagaacactttcaaatcctgcctttgaacgctgtttagctacaaagaaacgagcagatgcaccaatataacctgctttgccatcattgaacatcaaaaaataaaatccttcgcgctcagtaatttcacgagatggagcacctgctgcccaatcaccgttacgaatagaaccaatcagttctgcaccagcgttatcgagatcagcaaaagtcataatattacgcatgttaatttcctcagttaattaaagtttattctccgatgaggggccgaagccccttctactaccaaaaatatactactgccgttacaccaccaacccaaaacacaagaagacctaaagcaagcagacgatacacgatgtgtcgtttcatttttgaccttcccatacggtttctactaatgatttaaggccatcagtttgaataatatcaatcgcattaatggcaaaataaattccgaatccgaacacggcgacaattccaagcgctaccgcaacgataaaagacagaacaacagttctcattaagttaaagcgacgatcaaaactactacgaatcattatattttcctcagatgaaagcattaatccaaacgttaactaaatcccatgcgaaaacaccaatgaaagtaacgataaggcagaatactacaaaggtgttcttcaaaatcgtgagtaactttttcatttttgttctccagtttagctaacaagattatagtatcaccaaagaacaggaaagtaaaccgttaaatgcacaagttacgaattttttcttctaaggctttaactttatctatatgttcatcgcgagctgcagcggctccattgggatacaatccgccgtaagttgaatcgccattatcgcaagcaatgatagtataatgccaattcatagattcgagaatcctatactctttcaaaagttcagctttaatagaagcatttccgcgtttagctcgaagtgattttagctctaagtaactcatgttttactcccgttcagtttgtaaggccatagtatcatggccaatcccggaagtaaacaactttttaaaatttgtgcatgatatacccgccagcaccaactcgtgaaggttttactacttccatgaggtgttcgatgccgccggcaaacattggtgtgtactgtatgacattctgggacacttcttctgcaacgaatataattatacagtctgcaactttatgtttaaacatgggccctagatttattccacttccatctgggaatgggccgtctttaccagttgtaacattaatccatggcttatgatttgctcggtcatgaacaaagtgtgttttaacttcaactctaacaccttggtagtagggatgagctaatacgtcccaggcccattcatacggatcgttgttattatggtcaacaacttgatcgtttacgtatccatcaagaaaatctgctaccacatactctgccggtatagcaattctacatcttttaagaacatcaattctgtcttgagatggatcgatatctaaactatatctggcagtatcaatgatttttacttttgcttcaccccttagcttattcaaatctagggtaaatgtccggagttggttcaatctctgcagggctttgttcatcaatgccataaattcctctgatatgtaattcaccaaaataaacacgatcgtcgtggttacaagtgtctggttccacaacaaaatcatcaccaagttctacaagttcatcacagtgcaaccaagcatagtgaacatcaccttcatgtttaaccacatgatgacaaaataccgtagcagcatgatgagtaccacgaagattaacaactttagaatgagatacgttaaatggattaatcatgtttcacccataataaaagaggagcccgaaggctccttataattagcgaagttctgaaccccaacgatcggttacatcttcaagtactacataaccacatgtacgcattttagcatcgttgtaatcaaccgggatagatactacatcacgcggatgaactttaactgaaacgatacgatcggaaccactaccgaagtgaccgatgtaagatttagagcagacatgcagacctgtggaacaagtacgctgatcatcttcatctacctggttacgcggcattgtaacagttttacccggagagttatcaaatgtgtttgaagcacaatccatataagtggaacgaactactttccaaccaatgaagtgaccatcatcagtgatgtcgatatcgtttgcattcaggaaatcaaacagacgataaactgcacgacgagacgggttcagcatcaggttttccaggaaaggcagataacgtttaaagtcttcaccatcttccatagctcgaacgatacgctcagtcagaccagatttcagctcgatatctttatagaacaaagtaccatcttcaattcggacgttaccctgaacgaatttcttgatgccttgttccaggttaatgtggtcaatagcaccagcgatatcaccatctacaagtttctgcagtgcagatttaaacccgggatgttggctatcagcgttataagtagtacggccttcagtaattgaaatgaatttggaacttgctgcccatttaaattcacgctcaactggagcttctactttagcaggaacagctgccgccgcagctcgagcttcacgctctttaaacacacgccgaatggtgtcacgagaaacaccataattctcggcgagctctttcttagtgtacagaccgtttttgaagtttttaacgattgcatctttttggatttcagacagacaggtaacagccatttattcacctttattttcagaattttgagtagaagctccatcaaggagctccatgatttttacgatatcatcgacgagtttgctgtcagtccgccaagtatccaagacacttgcgatgacaggataatcatctttaaactgttcaatctttttatagaagattgtctcagcatcactagacagtttattataaattttattacataaagctaaatcatcgttttcatctttgattttacttgtacgacaaaccttagcgattttgtttagttttgtcaggaacggatttttcattccagacgcagtaaacttactcgacaagaaattcaatttatcgtaatgcgcaatatttccacagatacggtttccagtagcatttgatggcatgtactggtcgtagtctaccttatcaatacacttgatgtattggtcaataataaaccggtcaaatgaaagcaatccatcagctttggccgcggctttcatagcactcggacgaattgcatagaatttcttaattccacatgcttctgccaaagaacgcatatctgtgatgctcatattccaccaccaaacgttatctgggaaagtgtggatttcatcacgattacgaccgattgcataaccttcaagctcagcaatttcagatgatactaaagtctgacggtcttcttcccagtacccgtctttatcaatccaatgcagagaaacatttggtgatttcggacgtttctcttttggaccagtgtcgtaatcaggaagagcttttctctgggcttcaagttcagacacacggaatactacaacttcatcagtatccatgattttcttcagctcatcaatgacatgtaattcatcttcattgtctttgattacagtaatgtgtgcccagatttgaactaacccagatttacacagagcacgaaccgtagcaatacgcttacccgctttatcgtcaataagaacaaacgctttagttctatcaaccccgcaaatatcagaaatgtttacttggttatgacgatgccaagaactgcttgacactttacgacgagcaggttcatcgcatgaaacataaactgatacttcgttatctacataatatgaacgaattttatcaagattatacttcgcaactacttgtttaatatcgcggttcccaatggtaataccgcggctctgaagaatagagcgttccttagaactcagcttattgaactcacgcaggaattcacggtcagattcatacgcttcaaacgctttaatatctgaggtaattacctcttcttcaagagcattcatacgcttctggatattagcaactgtttcttcatcaagagaaagctcttcacgagatggagtgatatccaattcgcccaacgggaaatgaatataaaccttgccataacgattaagcaaccaatctgccttaacatctacaccgctgatcggatatacgatttttccataaactgcatacagaccataactttcgtaagagctattaacgctgaaccactcagtcttatctaccgggaaatattcaatttcacggcgaagagaatctacctttggaggtacagcaccaaatgtacgcaaaatatatgcgatttcatagtgccaggtatcaatatcttctactttaaccggaaccgtgatttcaagaccagtttcttcgtcttctttcatgtcatcaacaaacattggtcgaatagtaggttcaccacggtttttcatgacagtataacctgtagctttaccatcatgataagacactacattaaatgtacttgtatagcttaaaggcgatttagaaccaagaccaagagcaccgatgaaatcattactattattctttgtagattcaaagaacgttttgtacatcgtcatcatgtcattacgattaagacctgggccataatcacgaattacaaagcgcgggtcaagacgtgttggtgctttgatgtaaaatggacgattttcattaccattcaatttatgagcatcatcacagttagtagaaagttcacgaacaacggcacggactttatacttataaagtttatttgacaaaatgtcaaaagctttacctgaagctttaatggtaaacgttgaatcgtcagcgtcagaagaaccaataattacttcatcatcacatttaattttcattttattcctatcaattgtgtcgtttaatgatttctgctacttcaagtaactcttcagcagtagcggtgttagttgtaaaaattttattatggatttctttgaagcgttctttgaattcctcagctgcttggatgtcaaagaaccgctggatgatacgatattcacgatatatagcatcgttgaataattcttctgatgggatgtaactacgtttcataatattttcctcagtggtttagggaaattatatcactataactttaagcaagaatcctagaatcatctccaagcacttcttgattaaagccatataaatccattcttataaagaaaaagggacccggaggtcccttagattaccacaccctactaactcgaccataaacctcatgtttagaaccatcaatgttttcaacccagatggttacccaagttccgggcagaggtttcttttcagcgaacagatatccatagtcgcctgagatcaaagtaatccaataacgttgcatgttaattccttctaagtaagggcaatagtacccttactatttattctttattcactcatccatgtcttacgtggtgcagcatcattacccataattaattcaaacagttctttccagttttcaggaagagtgactacatcataaaccgggtcttgaataacacgttcgtattcatcttcttcaagagaaccaagacctttaatataacgaagtttccaacctttgaaatcatctttatggtcttcatattcaccaagagaatagaaccaacgttgttctttacctttggtgagaataataaccggagttttcacaaagcggattcgaccttgttcaaacagctcaggccaattactgaaaaacgctaaaagacttgggaaaattgaaccaacaccatcaacgtctgcatcggtcatgatagcaatatttcggtagttagtattttcagcaggctcaccaatcgtcaaaccagtgattgcacaaatgtcaaatacttctttattcttcatagcatctgcagcagacattccccatgtattcatgaacttaccgcgtagaggatatccgccatgaagttcacggtcgcgagttgtgagcagataaccgatcgcagaatcaccttcggttaagaataaagttgtgtcagcatctttaccatatttgttggctttgatgtgcttagctactttagctttctgcgctttcttggcggctttagtttctgcagctttctctgcagcaagtttacgagctaacattgcctcaataataggcatatgaatatcttcggatttcataatagcgttagcaagtttcttataatcaatatcaatatggctacgaatttctccccaaggagaagtcaaacgctctttagtctgagaatcaaatcgcatgttagacatatcacgaataaacatgatgacagtcagacattctttaattcgtgctttgttaacttctagtttgtacttacgttttaatgctggaataagttcattgctcagttcatcaagaactaggtcaacgtgagtaccaccatttttggtgtgaatgttattaacatatgaaagctggcggaacccatcatctgagcgaccaatagcaatagcacaagtatcagaatcctgcactaccgcattttcatcatacatctgggcgtaagctttaaacttaccttgaacacgtttacccatgaatttgaattcaatatcaggataaactactgctaatgtcatcagacggtcatgaataatatcttcataaactttacccatatgagtttcatcaaaatgggaaaagtctggaataaaagaaactgttgtaccattctttgtagaaggaacagttttccatgatacattatctgaaccattagagcatgtaacggttatttcatttttaccgtcgcacgttgttccaataaattgagttgaaaaaatattagttaatgatgaacctacaccgttttgcccgccagtttttcgttcagcatcattaccaaagttaccaccagctttagtttttgtccatgctgctacgggacctgggatttcgtctccttcaggagttacaaccatcgcctgtggaattcctcgtccgttatcagtgacagtgacacgattatcttttaaatctactgaaatcttatttgaaaacttgaaattagtacgaattgcttcatcaactgagttatcaataacttcatcaatgattttaattaatcccgcaacatacgtaacagatgtccattttccaaacataaatctttcatgagattcatttgctacactaccgatatacatacctggacgacgaataacatgttccttatcggaaagcatttgaattttattttgaatcataatcacctctttcaaaagcacgaactaacgctttatatgaaccttttggatatcccattgtttccgcgtgcttaacaaatgctgcagttttaggacagtttaattctaaccacaatttgtataaagcaatatcatgttcccatacagggctttttctatttttaataccacattttattgcagcctctccaacatgatgctttccgtaaaaaggatttctttcaccagataatcttccatttgggcaattatctccttttcttccatacatcggattcttttcgcctttcatccgattcgaatgtctttctgaaaattcagttgagtgggtttttccaaaaaatggattattttctcccactgtatccataccgaagcatccgttaatagtagcaaatgccatattaaagaagtcttttgatttaactacatcgtatagtttttgataatacaattcacagaaagtagcttcttctctagtatcaaattcatcaattatgcaactatcaaataattctggatgttcctctaattctttatcataaatttctttgtacttcttagatttaacacttccgtgataataatcatatgtatgcttttccaaagaagttgagcctatatagaacggaggcagtttatctccagcataaattgttagatatgtaatatatttcatacagctattatatactgagtttgcataaagtaaacaactaaatgacccgaaggtcatttattcataacgaattgtgctgttcttgagaaaaagtcctgagcacactgttccgttaacgggtttccctgttggcccaatagccgtaaagcctgtgtgctgaaaatcatcctctgagcaagaaaagaacttatatccagtgattttgatatcagtaaatcccgcgttatctaacacgcgagttgcgttatcagcgtcagtacatccaactatcatgaaggcaagcgctgcaattagaatctttttcattttaattttaatttaaccctataagttatattacctactttaataacccggatttctccgggtttcatggtaatgcgtgctttagttcccatcaataatcaccgctctttaatccatcgtagtgaactgccggagcagaaaccacacgcttcatttggccttcacacttagggttaaagcagttaacagtatagtcacgatgggaaattttacgcataatttctatcttttttccacagacttcacacttgtaatcatacattggcattaacagcatccttccatttttgtgttttgaccatgatttgctcattcagtgcacgagtaaccatcatggagatttcatcatctgatacatgggtatcatttttatgacgatttctgaaatgaagccaaagtgcatctactacacagttaataacatctgcgcactcgccttcaaattcttctttctgccgccatggacgattaatccaatcacacatttctccagtttctgaagaaagttgcaacatgacattcccaatgctacggttaggaataggataagacaattttgatgcttcaaaaataggagctaaatttaacattgatatgcactctgcagtgctgcaatagtagcgattgcctggccacgattatgaacagaaagattcataaccaaatcggttggaattacattcgcggaagttccaacttcagtaaagtatttgaattcgctatcaaaaattacaaggtcttcaccatcaatttcatcacattctgtgccattagcccacgtaattccggatactctattattttggcggtcaactttagtaacagtaaaactcccgccattttcatggagttcatacacaaagtcttcattaaactcgtaacgtgatgaaaattcttcttcagcttcgcgattgacgaatttgtactgtacgccttctttaaaattcattacacaatctccatgtattctgggccatcaactgtgattacacgagcaaaggtacgaaccgggacgatatcgccgtgattagcgaatacatacaaccaggtccaatgctcttctttaccaaaggttttctctttctgaacgacgattaagtccgggttgaacagaacatcttcaaaagcttcagcagtaatttttacggtgttttcagttttcatgttattctcctcagtagttgataagataatagtaccacatccttgtggtaaagtaaacaacttttttaaactaaacctggattttgtgattctgacacttctacgtcttcttttggaaggaccgcaaagttcccctgaaaaactacgtttactaaggttttaccgtcttcttcccactcatcagtgacaagaacatttttgccttgacttagattttttgccggatttttggggtctttagattgagtgacaacgtttttaagggttttaacacgaacccacttacgttcaaagctttctttaacattgttagtgtctttaaacttcaaatattttgcaggaactacaaatttttctaagcaatgaatataatcaccagaatcagaatgaattttataacctgctttaccatcattacgattagcaactttaacgatcacaccagtatgaccaacccacttgccgccagtaacttctacagcatcgcctacaatcaaatttttcatcgtgtttctctcagtttgttaatgtagagccattatataacagctctttcataaagtaaatagctatcggtgagaaatttcacatccaacatcgacgccgaacagatacccagcttcccaccctttagccatcatagccttggccaccagaaccatcgttggagagatttccgggaggatttcccggttgaaccactcttcgaagttttcatcgaactcaaactcttccattagccacgccccttaggtaaactcagtggatcggtatcttctggacttggtgcttcgcttaggcctagagcatagcgttgagcatatttaagcattagaatatctttggcacagtcatggatactatcatgcgcgataaatccatcgagcgtaccctttggaagaggggtagttgtcagaccacgagtcagaagcagcgattcaattgcagtacgaatatcacgctgattccagaacttgcatggttcttctttaaatgtatcaatttcttcttcggaaattccttgggctcgttgaacatcacgaagacaatcgacaaaaatcggaaagtcaaagctctgcccacgacaccagccaaaggaatcccatgggtgaattccattatcaatcagatattgctgagcttctttaattccagcaattactgataaatcgtctggcgttgaggccaggttagcccgggcctcagctgattgtttcttccaccactcaagagtagacttaccaaacaaccgatgacctttctgggatttaaggtcaaacttgatacgatgaccacgtttaaccaattcatcgaagctttccagaacttcagggtcagaatcaaatgtgattagagcaaggtcaatcacagaagagcttgacacatttccgaatgtttcaaaatcaataataaagtctttagccattttgagcctctagcataaatttaatttcgcgtaactggcaaccaacatattcgctcagatacacctttgggtcatatcctgtaaaccaagtgatagcattagcgttatctgctatatcacgaagctcattcagaactgtatcaattttaatgttaatagcacgcttaacattatccggtgcttcaaacttagattcttgtaagccaacaatcattgtttgaatgtcttctaatttcaattcaaacatattacctcacacataaaacacatcataacgaccacgagtagtaccaacatataataactgctgtgcgagagaagcatctgccatgtgaatacatggagtataaatgaagcttctgtcaattgagatgccctgggccttatggaaagtcgaagccggcaatgctttcactttatgaaacttacgcttagcatcccagaactcagaccaaggagctttacctcctttattccaattcttatatgtatctgcagtttttgccaaaaagaattgaaacttattcatttcttcttcagatgagatgacacagattttctctctagcgtactcttcatcgtcgccataggtttcaatatctaatacccaatgacgaaccagatattcacctggaacacctctggcacccaaaaatgatgtggtttcaactgcatctaatatgcgaacaaactgaccattattgaaaagaatttcgctgaatttctttccttcaaatttaagttccttggtaagaggttcttgcataacaacaatctcacctactacaaatggccgttcagtttcgtatattcttcgtctgattatttcattcaatttatccacagatttattagtgaacgcaagcattctgttttcaaataaatcttctggggttttaactaaattaaaataatttagcataaaatctttaagggcagttcctttcgtaaaaccacgtacaccatgaccatcaactacacagtcacgaatccatccaccgtttctaatttcggtagcgacttcaatgattggggcattactccgcatcacctcggtcaaatgaagttgtaagaaatctttatgagtgaagaatggactcagtgcaggttcattacttccaggttctaccggacgtatctgagccttatcaccaatggcaatgacaatacaccatgcaggaatagttgccatcaaaatcttaaacagcttacggtcatacattgaagcttcatcacagataagaactcgaatagatgccatatccggaactttcttttgttcaaacagaacgttttcttcatatgtcgtcgggttaattttcagaagactatgaatagtactggcctgcattccgctgagcttagataaaacctttttggccccatgcgtaggtgctgccaacgcaatgccagagataccctgagaaatcaaagcgtcaatgataaatttggttaaagttgttttacctgtaccggcaggtccattaatcgtaatatgttgacctttagctccttgtttgaccatttcaatgactttattaaaaatcgctttttgactttcttttaattggtcaaacgtaatcatgccacttttaccctcactacatgtagatttttaatttttgcttcgagtttttcgcgctcaacatcgctaagtggttcatacaccagctcagatgttttccaccaaagcatccctttggttttgcttttcccagtaaaattcccttttgctaatttgtctgttaaaaccgacattgtacgaatccgtgctttattagccgattcttcattagtgaagaccacacatcgttctccatcgtacatatcagttgtgactggatggtcaaatccgtctttatccttatacgctactacatatccatagtgttgcattacattttacctctcaaaagttggaagaaggacgcagtcaatggaagaccttttttcaattttaacttatctagcattgagcatttttctaaccgacgaagtgagttaacaattaaccgtattgattgtacacggatttcagcatctgacggacgattcggaactgacgctaaaatagcagataacttacgctcaactttagctaattcagacttaccaccgctgatacgagttctcagtgcattaataagttctaaatcagccgaggttgcagttccattcttttctttttgcacaaattgagaaagatgattttcacgattgtgtaagttagttttaattgatgcgatagttttttcatactcacgaatcttttcccaacgagacgcttctttatcacttgtaggtttaacagaatcagaagagcgaactatgcgtgccgcagtttcattcgcttttcgttcaaggtcttcaatcgtgttatttccacgcaatgcattatacttttgtttaacaggaataacattaccccatcacatatcccaagtcattgttccaacgctcgagtgtcatgctatcaggatgatttcctttagcagttccaaacttttcgcctgagtatgcacagtgtgtctgctgcatgatgttaaacagatattctggggtgagattgaactccttgtgccgacgttgagcagaacctaaagttgtaattaaacgagtataaactttagcggtttcagcagtaaatttcatcatgttttcctcaaaaatgctttcgtcttacggacggtataatgggtctaggtccctagttctagataatcactagttaactaagctatagtaacactaaagtagtccataagtaaaccagatttttcaactttgttatgacccaccactttgaacttagttcccatcggtagcatcttttctcgttctttatcaatcatctcgatgttagcgcttctgcgctgagcaacgttatcaatcaaatcattcgggcgaatgaattcagaatctggtgcagtaattaaaagcgatttcatgttggtatgataatcaaatgattgatggcaattattgacttcaataactacaaaggtcgagtaatgccatttgcctgcaaactctcgggcgatcgtttcatctgttgtgaatgacgccacctttccaaagtcaaatttctcgcctttaataagggcgtcataaaatgctttagcctcacgacacgatagacctctatagagaatgtcactgttatcaatttgatgacgtctaacgatagagtcaagtttcttatgaaattcttcgccaatcttatcgttcatgcattgccaaagaattgactgttctttgcagtcaaaacgattggctaacgcttcccatacgcttaaatcatacacaggtaatcctctgtgccgtcgcgcggaattcagaatatcaatagaatgaatgctttctgttagcatagcttgtgggtttaatgaaatagccatgatattctccatttttggttacgagaggtatcttatcatggctttttgtaagagtaaactactttgtgaaattattttgcccagggagaccagggcggcgggtcagaccagattgaagctagttcatctagaagagcttctggggctttaataccatacttctgtataattatacggtattcgtctttgatgtccttagaaatcactggatgaacttgaacctcttcctgaggctcttccatcatttcaaacaaatccatcacatgaaccactcagtattacggtacaaacaaccactgttgttatatccatcagctgctttttgcaacagagggcttggagtcagtttgataaaatctgcgcccatatatatccaaactaacttagtaaattctattagagaatctgtgctatcaatgataatctttttgcctcttgaaattatgtcattttcgtattcatataagctagtttcatgacatacattggtgtatcctttcaagtggagagcatgcagtatagaaacaggacttcctggaactgtatctacgtcaaagacatgggcagtcttaataatgccataatcttcagaaggacgccaaccaaacgcctcgaatttattaactaagtctttgaaatctttatcgaatgtactgtatagagcaacagtaaaattctatcttggtctagacgcaaagctccttttgcgtcatttcttgattgaacattacgttgtaaacttactttatagatttttgtggcaaacacaaagagctccttcagtcatgttgttgtcttcaaaccacttatcatttgctttaattaaagcaggtgcagcttttagtaataacgctgcagctcttacacctctgtaccaacaatcaaaatgagacttctttaatggtgattgataccagggcttagtataacatatcatcttcttctcctcagttagtaggaataatataccattcccagtatagcataaaaggactcccggaggagtccttaattttatacttctgcatcagctggaacagcttcaaacattttcgcgttggtggttgcccaagttgcagcatcatcaactactgttgaataagcatctttttcagatgggaaaatctgatactgtgcgttagcaatgcgatgtgaatcagaatacaccttaaaagctacagatacttctttacctttaacttcaccatcagcagttgtatggtcaaaagttttgatgtttacgtaagccattatgttctcctatttaggttacaggagtatttatatagctgctgtaagcgcctttaatatttctttatcaatttctcgagtgatttcttctcgaagggccaatactaaggccctttctttttgttttctgataatttttaaacgacgcttagatattcttttagccattaatatccattatcttgacgttcaaaattatgtttgtttttcagataatacagcttaaagatttcttcagaatccagaccaagcgccataaacatattcagaacaaagtgcaggatatcaatcatttcaaatttgatttcaagctggtctttgtcagacaggtctttgatataagtttcctgcatcttgacgtggtcagctttccatggtttccacacagcgctagctgccttttcaccattactcataccgccaagagacgtcagcaattcgcggaattcgtcatcaatgtagtctttttgattacgcagccattgcacgatatcaccagcttgagccaattcatcaggatgcatgttagtaccaggcttgtcatttgcaagacgaacctgaagagatttttgcatatcaagcattacttgcagagggtcaccaccaactttacggacgatacctgcgtatcgagcttcagctttatctgcaccagcgatcagttgactacattcgttaaagtgtgccattattttattcctttcaattaaattagataaatattatatcacttaacataaatagcaggaggattcatgtctgaagtgaaacaagaatgtaaagacaaaggaggatttggaagatatctttacgtcggaatcgccactgctgctttagctgcatggaattatgtggtagttccattagctagcacacacgggctagttcttcctccaatgccgttagaaaaagttgtgtcgtttattatgactggaggattgctttagtttaaggggctttggcccctataccttcgcatatttgtcaagacgcaatttagccattaaaccctgcgatatattttgattaatataatccgttatttcagaagcagttgccccctctttcataatcatatcatttatatctttgcttttccaaggcgatttatcccagaaaactaccttttcaccagcatctactaaacgtttcatacgcttaattgtatcaggatgacgaggttcatggtccataatccacgctcggttatcatggcatggaacttgagctaaatctaaagacccgccagtgattgcaatagcattatcaatgaacaacgaatctattggtccttccatgacgaatacgagttttgactcatcaatagtgtcgagaccataaattttggtcgcgtgttcatgggctttgattgtgatgtatttttgtggagcattctttcgtagtgctcgtccttgaaacgactcaatctctcctttcttgttgaagataggaataaccaaacgtggttcgttcgtctcattcttataggttcctggattaacggagttaacaagagaaggccattggttagtaaaccataaccttttccaagaagtgcttggaatacatctggcagtcacgtatttaactatcggatgttccttaggaagtctatctaatctctcgcagaaattaagtttttctattacggggagttttgcattaattttctcagacggttctacagcctttggcttatcaaagacctgctcctttcttttctcaagaagatactctcgatagaggtcgggttcattatctttaagatactgcgatagccacttattatactcacagttgaagcaatggcagcgcaatccttgacctgcatcaaaaatccagaatcgtgctttattgatatctttctgtgagtcaccacaaattgggcaacgacagtttaacttgaatgttgaagatgtagtaacgtgtctaaatttaggtaggtgagatattgcacgaattgcatactcgttatcaacccaagacataatatttcctctggccttaaactaataaggccattttatcactttttcttggcagcgtctttatccgcttttcgtttctttggaagggtttctgggcctttatttactactgcgcccgaagtagtgcctgatgcaatgttctgaggattaccgccggcatcgccagcaaccatttcctcattaagtttaacaaactctttaaatgttttcatagagcctccaaactatttattatttccaccatcaatacgaatacacttgtacgtagtgtagactgatggtgaaccgaacccggaatcggctttgatgccagtaaattgttttcccgcatcttcacatttctgagccagcgaagactcgttcattcctgtgaatgataacttttcagtagaaacaccgccggcaccagtcattatagccattactaatacgtatgtaatcatccgagaatccagcttgcaattgtgaagttatcaaaattagcatcgcagtacagagcatagttcagtttaattgctgcgccatcattggagatttctgcctgaacttctttcatcttgcttgggtcagtgttatcaatgatatgacctacatcagcacgaatctgctcagcaacatctttttcatctgcagtcattgaccattcgcagaggtctttgtcatagttcgccagagcgggaacagcagagcaacttgatactgcgaagattaaagcaagtacaatctttttcattttgttttcctcagtttgtttcagtaaggccatagtaacatggccaaacttaaaagtaaactaccttttgaacaattttttcaacaaaatgtcagaggtcagattcttggtaggtaggtatgtagcagagttaacccagatgccatcgctgtcatacaccttgacctctccatagtcgcatacagataggtctgctttgttatatgcctcaatgcctcgatgaatggtatctgtggctgttacaacaaaagagtgacctgactggtcacggaccgcgctaaacacaaaaatcataaaatttacctagaattttaactcttctgccagagcatcaagcttagaacgtgatactcgttcctgacgattagattcggctacacggttctgtacacctgcaccttctcggacggtattggttggattaggcttagttgggtcgttttgcttctcaatttctacccagcgttgattagccttatgcacgcccataaagaacttattgttgatgttcttatcaccgtaacgtgatttaatctgcttaattaactgttgcttcatctgagcaagttcaggggtttcaatcacagctaacataaagtctgccgtagcaggtagacccgcagattctgcaatatcactcatgtccatatcagaagcatcccaagccgaacgaccgacctgagctgcggtccaaagaacagtttcagattctacagccaacgcacgaagttcttctgcaatagctttaactaacgtgtaactgttttcagtatattgacgaatacgacaagaagcacaaataccaagatagtcaatgatgataacagtcggtttaaagttcttcttgagtttcaactcattcagaagagctcggaatgtattagcgttagcgccaccagtcggatactgtttaatgattaaacgaccaagagtactagaactacgccatttttccatcttgcctttatattcagcgtatgatacacatccatcgtcaatatcgtcaagtgatacatcaagcaaattagcatcaatacgtttagcacaaacttcttcggccatttccatggaaatataaaggacattatgccccatctgaagatagtctgcagccaatgaacacaatcctaacgatttaccaacgttgacgccagccatcaatacgttcagtgtaccagtctcggcaccacctttagtaattttgttcagaatgctaagtttaaacggaactttacgagctttattctggtatgataaccaacgagcttcataatcttccatccaatcatggccaatatagctatcaaacgatactgataacgcttcacgcatgatatcaggaatagccccaatatcaggaagacgcttatcgcgtttatttggctcaagctgggcattagtctgaatttcaataattcgagacgttgcgttgtacatagccttttcttgaacgtacttctctgtttccttaactaaccaattcaaatcttcaggagcatcagataacttatcaataagtttctttgcaccttcatgttccgtttcagttatagacgaattatcaagtgctacacataacgcagtctttgaaggaattgctgtgtattcattaacgtgtttcttaattatgttaaacaccgtctgagcaggtccttgctcgaagtactctttgtccatatatggccaaaccttcgtaaagaaagcctggttgtaaatcagattagctaagattgtttctaccactttaacctcttaaaagattttccataatgattttttcttggtctttaatgcactctggatttgttgtttaacacaagcttccacatgaggataaagttcatccttatgagcttcagatggtgtactgaactcaatagttacttcccccgaaggagaaatatttaatttatgaacataaaccaagtgtgattgaccatttaattttatcacaatttcttggataacagtcttcatagcttcttggattatttcatggcttttcttgaacactcgttcttgacgctcgaagtctccccttccgagggagattcttgttcaaatttctcgagttcagattctaaatcaaactcagtcttcattcatgaagttctctaattcatcttcaacttcagcagctgatactgaaccactctcaggaagtttaacaccatcaaccttagttgaaacttttgagttaatcatttctgctaccgcttcatcaaccgcagcgtttgaatcaatagcacccaactgataccgggctttgatagcgtcacggaatggctcatgcttaaacagaggaccccaaaattccgtactgctcgtatcttttgcccgccaggatttttcttcacgaatcatctcaccggtttcaacatccaggaattctcgtgcataccatccatttttcggtttaaccacaaacccgatatctagagccatatcaagcagaccactatatggatcgataccaccatcgaatttaacatcgatgaagaacttacttttctctttgacagtacgcgatttctcagcgttcaggacaaactgatatccttcaagctcagtaccatctttaatttgacgtttaccgatgatgaacacagtatccgcagaatacataggacctgtaccaccagtcattaccgtcttactgaacatctcgatagtctcgattgtgtggttaaccgcgacacaaggaatgttcttaatagagaagtaaggagttacgatacggaagagagacttcagacttttcgcacgagtcatatctgcgacagatttctcgttcagagcatcttcggtttcctttttagacgccatgttaccaatagagtcgataaacacgatgactttttcaccacgctcaatagcttcaagctggttaaccatatcgatttttaattgttcaaccgactgaaccggtgtatgaattacacggtcagggtcaacacccatagatttcagataagctggagtgataccaaattctgaatcatagaacaaacagactgcatcaggatacttattaagataagcactaaccattgtcagagacatgttagatttgaagtgtttagatggacctgcgaagatagtcaacccggactgcataccaccatccaacgctccactgattgcgatattaagcatcggaattttggttctaactacatctttctcgttaaagaattttgatttagtcagttctgctgtcattttagaagtggatgctttaatcaggcgagattttaagtcagacattcattatattccataagtctccattatatttttctcacaggttaaaggatagagtaattatattactttgttcttgaagctattaacagaagttccatttcttcttggtgttataaaccactgtttccatatctatttcatagtgtattttacatccaatgcacatgccatgccaccagcaatgcattccatctgagccagtagttccttcatgaacaaactcatcagatttacatacgaagcatctgaattcttcagctttgaaaatgttaccagctacgtcagatttatcatagatgttcataagaggtccttggagggctttcgccctcaaagatatggttctaccttaccaaactcatggaaggcctgagatttcactcgagtgttaatacacatacgaattgatttcagaggttcgttatcaccgaataaaccacgtctttcaccatctttagatttccaacgggcttgatttgggaaagcagcatgtagttgttcaagggctctattttgtcgagcagtatcacgttgcgtagagcaaccaccaggagactgtaccttaccagatttaacgaggtacttaaacagagccagatgaggatgacccatgttaattaattttagaaaagcataagcatcttcgttaaggtcaataattccgtagccaatgtcttctgcggtaagtttagtcaaatcatagaaagtattggtgaacccaaagctattctcacgataatgaccccagcttgatgtgattttgaaaatcggtaagcgagcatgaccgtgataataaccacaatccatggcagtctcgacgtatttgaccatatcatcaaatacctcttgactcattgcctcgccgacaccaagtggaacccggcgatcgtcgcgttcacgaatttcagtcagatgaatggtcgtatcatcatcaagcatccaaattcgttgccctgcatacatttcagtaatcagacggcgagttcccgcaattccatcgacatcatcggggacagtaacgattttagcagcatgaccgtgccaagtttcgtatgcttctttttctgattcacgtactacaagatgtggaacataaccttcaggaaacatagtcagggcagttactgccccggcgcgcttataacttggaattacaaactgaatcatttccattcacctttatagtctttctttgcgatgtgagtttcacccgtgtgagcataattatctacgagatagaaatgtcgagaatatacgtgcaaagacccgacgttccaaataatgtcaccaactgaataatttttacctgatgcattcagaagtttggttaactgttccaaaacatagagctgccatgcatagtcattacgatatccaaagacgacatcattcgaacgcatgtttaccacagcatgcacacgattatcacgaatcagatactgaacattgttagtacacatgaaatcactcatgccatcgcgctcaaaatcatactgcatttgaggtcgtgtataaatcataattccgcggcgagaatcaggattattgataagttctttcgcacagttagcaaactgtgaatagttttgtgttgaccaaactgcccagccatagttagaattaatctcgccgtgtttggatgcaattgctttccaaatagctggggtttcacccggaatatctttaacgaataaactttgagatttataccactcaagttcacgagcaatgtatccatcattaactgcgccaaaaattaggttttcatctgcaataaatgatgcacctacgatttcaatagtcttcacacccgtcttatcaatcacaaattctttgttgagcaaagcatcagcgaattcttgacggatatcttgtactgtcattggagttacaatcatgagacctcttatttaacttgctggataataattgtattctgctgtgcgttagaagcagaccaaatcagcgcaattaaccaaccgataatggaccaaccgaatactagatttgtgataaagattccaccccgtgatttatgcttacgactgcaagctacaaaggtcggcaaaaaatagatgaagaaaagaataattaaaccaaatactgcttccatgttaatctcctcagttagacatgcatttgttgtagatgtgattttggagagattttaactgctccatacgttgtttatgctcattataactcaatccgccgttagcaaaatcagttaaacgaatctggtcattcactgctgccgctttagcagtacatgtacgttctttttgagttttacgcagacgcttaatttcttccagttcatgcttattctgctcaatcatgtcaagttccatcgcagacagctgacgattaggattagctttttctttcgccaaccgacgctcaaccgcgagcgattcagcagagacctggttgctagcacgatagtatcctacagtaccgccaattgctcgcacctgcccaacagaagaagccgggacgatatcaccttgtggcatttgacaaccagtcagcgtgagagcaacaataacagcaagtaacgatttcattgtaatctcctcagtatgttatttcgagagctatagtaccacatccttgtggtaaagtaaacaacttttttaaaaatcgaacatgtcaagaagagacgatttctcttcatagtctaaccctgccgcttcagacatacccgtcagaggtttaacgaacgatttttggaacagaacactgtggtcaagccacactagaacttcctgtcggatttcttgtggcagctcagtgcccgatggccatgccatgcatttctcaccgtacgggttaccttcacgcagcgggatgaccatcaccttctcgccttccatgattggtgttataccttcaaatcctgcggttgctcggttatatgccaaagcacctttaacgtgatatggtgtacctttatctggatatcctgcaccgtcatcatacttaccgatgttgtttgcagtcttaacttcggcgattactttataatcaagttcacgatattcagactcaaactgcttataatattgctgtaaagattcttcaccttcctgcagcatacgccgaatagattcttccaatgcattctgaacagcagttggcgtagaactttgctgagtttccatacccatgattttcagatgaggttctgcatatcgagtaccttccatatcatacacgttcagagcatatcgtttcttcgctttccagaatccgccaatgccgtttgaccccaacggaggacaagaaatagcttcacggtccatgaacattaaatgttctttgttgttcatgtattcacacatctcacgatatgattggtcaatccatggttccattttcttcttgccgaattggttcaggaattcgaccaaatcgttagtttctttgaaacgctcaagacctaccttctcgataaccttatcaacacaaacgtaaattgagtcagtatcaccagctactacaaatgaatgaccttcggtgccacataccttgttgagatattcattaactttacgttcaatccattgaattgccatttgaccaaacaaggtgattgctgatgcgttacgtaaatcataataacggaagtaaatgttacccaatgcaccataaagggagttgatcaaaatcttacggtttaactgattagtattacccaagatttcagcatgtttacattcaaacatcagtttgtcaaggcactcttcagtatatgtcagcagttctgctttcatatcatcagagaaatcttcatagacattaacttctgcgaatttatcgatagttccaaacttcttatcattcagaacctttttaatcagttcttgatttcgtttggcacccatcattttatttttccactctttacgctgataaaataccttcgcgatttcaactggaatgacaccatctacgtctttacgatacatccaaccatttggtgaacatgaatattcgtcagacggacgaggagcagtcttgttaatgtactcacccaacggatgaagtttaaactgtccaacgatggtttctggtgaaatattaacttgtcggatgattgacggatacagagatgtcaagtcaaacgacatgatataacggtatgcagcaggaactggttccttaacatacgcaccaggatacgactgtttaacatgagaacgactttgcggaataaccttgtcttgttctttcagactgttaaagatgattgcgtcccatgttttaattggactcattacaccttgatatggcatcttcgcataataagacatcgagatagctaggtcaataaatccgcgaacagcatcaatcgcttgtactgattcaacgtcgatgatgttatacgaaatataccgttggtgattagtttcacgcaacttattgatcggaccatcatatgctaatttacctttcttggtttcataataagcaatgaaatccaatttatacgtcggttggttcgtgaaactaaacttcttatacaaatccatgtaatcaagaatagtcacacccatgatagaataaatttctttgtcaccatacatgtttgtgataatcttagatgaaactttattcagaggagagaaccgtttcatcgcacgctcaccaagaatctgtttcacacgattcatgatgtacggaatatcaaatccttcaatgttccatccagtaaagattgctgggcatttctgttcccaaagattgatgtactcaagcatcatttctttttctgaattgaacggcatatatactacgcggtcaagaatatgttgtggaacttcatcaccgccttcggaatctaaacgagcagcgagtttcttgtcccactcggaaacagaaccataaagagaatgcagtaaatcaaatacgtagaacttatcatcaaccgaatcgtaatgagtgatagcatcaatttcatattctgctttcatcgggtctgggaattgagatgcagtaacctcaatgtcacagtttgcgattcggatgaattttttattataaacgatttctgaaccgtaagtatcactgatatacgcgagtttgaaatcatccatacccattgcttccattcccatatcttccatacgacgcatccaatcgcgggcatctttcatagttgggaatgtgttcttcttgcaatacttgccatagatatctttgtactttgtttcttccatgcaatgactaaacataacaggagaatacggaacacggcgcatgcgttcctcaccagtagaatcgatataacgttctacaatgtcattgcctagagattcaacgctaatataaaattctttcatgggtttcctttgtttatagaccgagttattagtatttaggtgggataattataatccgatttttataaagtaaaagggccgaagcccttttcttacgcgccgattgtgtacttagattttaaagtccattcatgtttctgtttgaatgtaattacccggaagttattctgcatctgggcaagagtttgaccacgattaatacttagtagaccccagtcagcgagcagttgtgcgattgagtctcgacgaatttcatcttccaaatcaatagtaacaggacgaccatcaagcttcaacatttctttaaaatggacgatatagtaacgaccttgtttctgaagaatgtggcagctttgatatagtaccttatctttgttattagcaattcccatacgagtcagagtttctttaactttcaggaagtcttcaggctgtttcagtgtaatttcaatcatatttaccattccaatgctgttttcttaagagttttctgttctttcacgtttttcgtgattgtcttgaccaattcatcagtcacaagacctttcattttcttgagagcaggtttaagcttgtttttagcttccagggtctctctatacatcctagcatcaatcgcattgaccttgtaatatgtcattataacttgaagaatcaatgcatcctggatgttttctgttaacttagcccattttccataccgacgacctctaggaacagaggccatcatatagttatagtgtgcttggtcagataacccttgaccaacaaggttcataacataaacagcaggcatacagtcagcatgctgagaaagagcgttttcaaccatgaattttgaataatccatagtcgagatgttcaaatgctctttcttttcattaatagaaccgataatctcgaagaattgattttctgccttttctttatatgaatcagataattcctggactttcgtccagtctttacctaaccacgcgatttggtgctcattatactgatcatcatcttcaaataaactcatcatttccactgcatctctacaacaagttgaataagcatataaaccaaatgtaattcaatcgaagctgctacaccatgatactggttattttcaccaatgatttcatacattcggataatgcttgggccagtaaccattgtatacagctcagaagaaagtttatctacaaaccaagtatagtctgcagcatatttcggagcaagagcacggagttctttgatgttcttggttttaatagcttcaatgacatcttcaattgagccacggtcatttaaaacaatagacaagatacctgcatcaatcacacccttagaagaataatgatcaagcatgttgatggtcttacggaattctgggaaattctttttgaccaaagcagctacaactttcttatcttcaactaccactccttcattttcacaaatcgcgagacaacgtttgagcatctcgatttgcattggcttaacatcagatggagatggtttaccaaaattaattacacggcaacgagactgaagaggtttaatgataccgtcaagattgtttgcagtaatgataatagtacagtttgtgctatacgcttccatgaatgaacgcagatgccgttgagattctgcaagacctgctcggtcgaattcatcaatcacgataattttctgcttacctgcaatggatgcagaacttgcgaatgcggttaacggtccacgaacgaaatcaattttacaatcagaaccattcacgaacatcatttcagcattaatgtcattacataatgctttagctactgtggtcttaccggtgccaggagaagtactatggagaattaaatgaggaatttttcctttagctactaaagccgaaaaaatttctttatcttcagcaggcaatacacactcagaaatagtacctggacgatatttctgttcccacataaagtctgcttcgtttactgtcaatttcatttatatttcctcattcagattaaagatggggccgaagccccgaatttattactcaaagtcaaaggtactatctgcttccattgctaccacataagaggctgatgcaccttcaaattttgctgcagtctgtttcttagcaccgttcatttttgcccacagcatcagtttgtaatcgccaacagtcattttcatattgctcatgttgattatgaagttgaagttaccttcgccatcataatcaccgagcgtcagagaatacttcggacgagtcagtgcagcatcttctactttattataaccacgcagaacaattttaccatcaacgttggtgatagcaattgtgtcaatctgcatgccacgagatactcgcatcagctgttgcaggtcttcacctttaaaatcgataattacgtttgccaccgggaatgggattggtttagtcggaaacacgattgtgctcggatcagctgctggccagaaaatagtggaacgagcatctttaattgccaggttaccatcttcctgcatgataatatctgcatcatcaccaaccagagacagaatgctcaggaaactgttcaggtcataaattgctacatcagtatcgatggtatcagaaattgttgcttcagcataagtcgtaccattaacagcacgagtcatgataaaattgccaggtttcagcatgataccggagttgatggtggagaagtttttcagaatgttcagagtttctttagagaatttcatttcaataccttttaattaagttcaggataattatatcaagctgcgaatgtagcagttaattcttctgcaacaatctgacctgccgcaacgagttgctcatcagcatctacgcagtaatcattttctagacgttcgccaccatgacggtcagtaacaattttagcaccagccttgattgcttcgttgtaatgcttacgcatcaattcaatccatttttctgcaacttcgtcgtcaatagatttatagaaagcaaagcgagcttcagaatctttaatcttatctttaatagctgctttagtttcttcagttagagccagaacccaagatttacgaatacgattttggttattcgggttggagtctgcacgtacgtttttaacctggatatctttcacatcaacaaaattaatcattatatttaccttaatcgtaataatcttcaaccatccaaccgggattcctgctggacatgactctattatattcatttcctgtaaaagcatctcgtaacatttcttctgttactaagtgcttttcatcagaaaacaaattagttaacacatatcgctttacttcaggaaaggccagaagatgctggcccgtagtaaactcattcattccatcaccgtgaatcgtccgaccttcttcatttgaaggtgttggccatatgcctgtgggtcatggtcacggtgagaaataataaacacattggcatctaccatcttattaagaatagcagttattgccttaacaccttctgcgtcggtggccgaatcataaacttcatcaaggaacagacagtttattttaacaccagaaactttttcagcaatatcacgccatgtgaatagtaatgctatatcaattctggctttttcaccttgactaaacgaggcataactaaactcttctcgtccacgagatttaatcgtttcagagaactcttcgttcagtgtgaacgaataatcagcttccataatttttaggtagctgttaatttgcttattgaacatcgggatgtacttcttgatgatagctcctttaataccggagtctttcagcatttcagttaaaataccacgacgatatttttccataaccaaattagttttgacgaggataattttatctaattcttcttgtagcagttcaatcttgtcagagttatcaatgaactcctgtgatgctttatcaattgctgctttaatacgacgtgctttatcaactgcagttaaagtcatctgcttcaaattactcatttgatttttgatgtctcttgcacgcgtacgaatagtattatactcgcgagctagttcatccagttcactctggcgcgtctttaactcaccaagaatggtattacattcttcaacatgatgattaatcttagtgattagagtgtcattagaatgcaaatcctgcaagcacgttggacaatgaccgcctttatcatacaacccaagaacctttgagtatgattcaattttagaacgaatcttaaaggttttaccttgaacttcttgaattgactctgctgggtcatcaccaatcacgagttcaagcagttcgctttgaagagtttctaattctgctttatatcctcgtgcctctttcacttgctcatcatacatcgcctgcaggcgagctacgttatcaccagaaagtttcttctgtttttctgcatactcatgatgagttttaatttcattagtcaacgcttcacgctgaacatcattaacctggatttgctgattgatttctcttatctgtgtcttgttcagtttgtccatatcagccaaaagagacacttcaagcaaatcttcaacgagttttcgtctgttggcagttgataaccccatgaacggagtatatcctgccgttcctaatacgacaatctgcttaaacgatgtgtatgacatgccgatgagactttcaaagtaggattgaaaatcctttgaacttgcggcttcatcaagcttattgccatctcgtaaaatctcaaagacattcggtttttgtccacgtttaatgtagaaactatgaccgtcatactccatccacagttctactacagagtccttcttattgaatgagttaattaattgacctttcttaatatcacggaatggtttaccaaataaggcaaaagtaatagcttcgagcatagtacttttgccaccaccattcttacctgtgattaaggtcttttggcatttatcaagttgaatgtcaatggccgcttggccaactgacattatattcttatacttgacacgatttagtttaaaagtcttcactgattttgtgcctcaatgtataactgtttagacataacctttaaggctttgatatcatctgctgataggtcttcaagtgcttggatatattcttccattaaatccaataagcttttaacttctacttcttcgccatcttcagactcaaccgagttgtcaactttagaaacagttcttaattcatgtactaccttttcaagttctgattcaaatttaggaaggtcttcatcgaccgcagtgataataatgcgtactgcgagattacgaaactcttcaaagtcaatttttccagtaacaggataaatcagttttctatgccaagtgatttcattagggacgaaatcaaaggttgataattcagtgtcttgaacccagaagccacgtgggtcgttctcgtcacccgctgtaagcgtccaaggcgttccgatgtacttaacgtttgctgcgcttgatatggtgtggaagtgcccagaccacacttgtttgtactttttgaggaaatctggttccagcccatgagacttcattcctttataaaaataaaagccattaagctcccagtgaccaatacagtattcagcagacgattctttgatatgcttcatgatttctgatgtgttctcttcacacatccatgggcacaagtcaatcaaagtcccatcaaaatccatagtcacgggcttttcaataacagtaatatgcttatacttaccaagaacttcggttgatgcattaggcgtcaacgtattcttgtagtgcatgtcatgatttccgacgatcgtaattaagttaattccttctttctcaagagactctgcaatttcacgagcaaattccattgtcttatgagtgatagctttacgaacgtcaaaaatatcaccgtattgaatgatagttttaattccatgctttttggcataatcaatatgctgcttaattccgtgtcgttgtacatcctgtacccacgggtcatctgcgcggacacctaaatgccaatcgcctgagtgaataattttcatataacctctctagtagagtttaattttatattattccatgaatagcaaaaagggcccgaaggcccattacttattttgtcattaactcaaattgttctttaaagcaatgctcagaatcttggtgttctaccaggaattcatatgctttatttcgctctttatcatagagcttccggtcagacgacagatgtttcattcgttcaaagacttcatttttattttcatcattcaaccacaaaatgccagaatcatgagaagtcaatggctttccatcaacccggaatttcaaagcatcaccagtagctttatggaacacaggaatagttccacaagcgcctagttctaaatgtgtgtattccaatgaacgctcaaggaatttatccggaagacgcgacagctgatagccaaatccagactgagacatacgctcaagcatttcagagttaacatatcggtcaagaacttgaggattcagacctggtccagttttaacctgatgataatgacggcaataatcaatttcatagcgttctttgatgttaataaacgcaggactacgttctaaaccttccaggatagtcgttttacctgcaggacgcagatgactttcatgaaagtcaaacatcaagaaatagcctttccatgtagtagtacgaccaatccaacgatggatatcaaagtcaatagcagagaagtctttccaatacttatcacgaattgctttgatgttcatagcaggttgaaagttataaactggaggagctgagtcagaatcatcaaagaaactcaacccgccgcttggaaaatattcttccattagcacggtattaaaatcgccgtttgagctatgactaaacagtacatcagcacgcttaacggtttcttcaagaccagcatttctacgaagtgacaatgctctatggtcatgttgatatacgactacccgaacatcaggtttaatgttctctatgagcttcttatagttatcaatcgctgcttctggagcgttgacagcaggtactgagttaatgataagaatgtcacatgcattaagcagagataaggtcttatcgtagtcatctgccagagacacaggaatagttacatctttatagctatgtgctctattacgagtaaacgctttatctttagcgtaaatgatatttacttcatggccatgttttactaaccactcacggtgctcgagactgaacttggttacgccgcatccctcaagtccgcgagccattaaaatattaatcttcatatattgacctttgttgttaattttggatattttaccattcccgtaataaagcaaaagggccgaagcccttttaaattttcttgtatacaacataacccgccgcttcacatatacgcttagcttcttcaaagcgtctaagcatatctaccttggcattatgaattgcttcataatcgggagcaggtgcttctctcctagcagtatcacatttataacagaaataactacgttttggtcctgtataacgttctgaacaattactgcaccggcacgtgtaatttccttccggccaatcacgtccaggattagaacccatcaaattcgtcatacatcccaattctcttcactagtaataaaatcagggtgttcatctaaatcaatgaatccccagttctcttcatttaccattcataccaccgtttaacttggaaggtgtcaacccagacaagagagttcttatctattagcttacatccttcggtagagcctaacacgcgatattgattatctgctacctttactgccatcgtaccagtcgcagtgtttaaagtaaatcctgcgtctttacgaacacgtttaaattttacttgtaccagcatttagaatgtcccaaacagatttacgagaggtattccaacaagtcagaataatctcatcattaaaaggttgttttaaaatagtacgcagtttttcaatagcatacttgtaagcagggaaattattgtctaataccgcgtctccagcatgagcttttaatcgctcaagttcacgacggtttttacgaacaattttgttggctcgagcaatagcttgttcttctgccgcttccattagtttctgctgcagttcgtcgcgctcttcctgggtaatattgttcatgttattcctttggatggtaatttatttcaaatgtgaattcagtatcagtccaattataactatgttcaattatagcagaatctgatctgaaatcagcgtcatgtggatttttcgggtcaatgtgaatatcaagatcaagcacctcccttaaatacatctttagcaaataagggatagcgtctaggtcttgcacatcttctaaaaacccgtcgaggttaatcttcagcctcatataaaaattccagattaggtccatcgcttgtaggttcgctctttttagcagaccctggcgccttataagcggtggattcatactgcgtcattttgtcgtagatgtcctgaataaaggtttcatctgctaacgcaaccatatcatcgtcccgtgaatcatacacgttgtggacaaaatagctgtatttctttgccatttctttgcgttcttttttgatacgctgaacgaatgcattgaaacaagcttgtgttatatacgcatgcgggttatcatacttagtttcatcgaagttgattaagcctttaattgcggcttcaatcccgtctgaaatcatttcttgcttccaggattgggtgtatcctgaaaagttgaaacgcttactcagaccttccgcgatcagcataatagcaaggccgatcgtatcgttctgttttactactcgagggccgccagcagcttcagactcccggcacttctctttccatgcacagattgatttatagagttccttgttatttacataattactcatattgcctcttcgcttcaattaataatatctattataacaaatttgggaagcgagaggattaaagcattacttaatcaattcagcgcatgcaattaatttcatcatgatacgataaaaatcgttatacgtgaaatctaatggaacatcaatgacggcttcaaaatcttcaaatacacgctccattccataaccagcgatatcatctgattcagcataccagtacgttccatcttgtgcaaaagttatttggctattttcaagacagaacacacctttaatattttcatgtgtaagagtcaattgaattttcatagttcacccttcataatacgatagcattggaacagctgttccatgatacgtttgaactcaaccaaactaagttcaaaccaatcagattcatctacttcatgcatcatttccatgaatgaagagtataaactttcataatgagtttcatttaacatagaggcatgcgtttcccaatacatgccctcttcattgtcaaaccaaacacccatataagaatctatagtaaatccgccaatgccttctactacaatcataatttggtttactttagccatgctttcaccgagtcaatagcatcttcaaatttagagaaagcatctacagatgtatattcattctcaccagagcgttcataaatccaaaacgcgtcaaaatcttcttcaatgatgaattccccgttaggagtttcaatcgtgtttctgccatcaggcgttttagatatgaaccatccgagtaaaccaacttctgtaatttgttcttcagtcatttagaatttccaccaattgattatagtttaatgcctttccagatgaaatcataacattacaaaatctgtatagtgcttcttttgatactttatacacataatcagaagttgttataatgtatgaaatgcggacaaacgttggagatttttctgctaactcatatgccaattttctagctctaccgatatcatcagcaaactttgtatcagcaagcaaaatactatcaaatacccaacggttagtaaaaatttctgtgtatagaataaccttacgcatcaagatactctcgcagttcctgctcgtttaacccttcttgccacatctctgacggagatggaagttggctgtctagagtggatgaatcaattggaaatactctgataattacgctagtatcttcatcccattgatttgtgagtatccgtttagcttgactaatatcaggctcagaatgagcccggatatacttaatccttctatgccatacaccagtaggaatagatgcgcacacgatatatgaaatcatttcgccgccttaaccgctttaacatcgcggaagcctttcttacgttgattcttcatcttacgaatagtgctttcagaaatttcaccgatacccggagtgattggttctacaccaaatgctttgatgccaaattcagacagaagataagcaaccactaattcacggatgcgggctttaccaattttttggccttcttctttcatcgtaccgtgaagctcaacttcccactgatcaagcaaagacggagttacacaacgtccttcttccagcattgcagatactttatcataagcaaaagagttcagtacgtttttgattgcttgggacatattaatttcctcagtaacgattgttttgacagaggagattctaaatcaaatctcctgtagcaaatcaatctttgagagattttagttcttcgagcatatcgtagtattctttactagcaaccggagctacagtacagtggtagctattgaattcatggtatttcacgaagcgttcaaggtgccacttaatcagattgttaattcggtgaagtagaaccccatctgaaccaacgtagacaaccacttcaaattgaagcccatcccaaattctggtacggacgatatcgcccacattaaatgttttcatacgacataccaatgttcgttttgccaaggctcacctttataccagcgagtcatatcatatccgttctcgtcacggatagcgccattacgcatatagaagtactcgtcatcagtaaaatactcatgcttaacgatacatcctttacgcatagcctcaagagcttgctgccaatttaaccaattcatattttcctctcgagttaaacggtatgttgttatcagttgatagagctatagtatcactcatcaactggcttgtaaacaactttgtgaaaggagtttagaataaaagagaggtcccataggaacctctaaatgaagggtatagaaatatacagaaggtggtcaagatgaccttagaaaggaactggctaatcttctatgatatctggatcgtatccagcagcaataagattggctttaaatgttggaatgtcatactgcttaacgttatccataaaaatgacaggataccgaatagcaagcgatggatagcacccgatgcgtttagcaagtgactcaatcaacggacggtcataaaccggctgaccgtcaacctcgttgattacgttatagaactcatacggaagttgcagcttatcgagcaagtcacgaactgctttacatccagggcatctccaaacttcttcagggatgccatagatttctatcatagttcagccttaatctcagaaatcaatctttcaattaattcaagcttatcagctgtagtcataggataaattttgtcgacagtagcttcttcgagatagcaacggtcagcatcattaagtatacaccactgatcaaaatcatcagcatctatgctaacaccattgaatgtcttaactcgttcaacagacccgtcctgtgtcagagctgttaccaaaaatggcttaaacttgagcatgttgtagaattcaacatcctttgacgacgcgttatttagccatttatcaacagaatcttctttaaacttgtaccacttatcgcaacaaaataattctatcatttcatgacctgttgaagtttggcagtcagagtattaacacgcttctgaaattcttcattagacagtttttcatctttcttggtaggattaatccaatctgcgatgataataagaacaataaacggaattgctacgaaagcacctgccgttaatgcaaccaaagcgataacgttagaaataaatttacgaatagcattaatgaatttcataattttccttaaatagttaagatgaatgctgtcatagccagaaattctggtccaaacagttcagtagcaatgtggttcagagtaaacataattttgtaagtcagcatataaatttcctcaatcatgtgtccaggtagaaccgtttcttacccagagtctttggttgtcagaaccacgccagtttttagtagttggcagtgattgctcgtatttcccatcaattataacatcaatgtgttgtagcaaatctaagtctttaatatcttcaaatttatatcctgtccacatccagatatctttctctgtaaatcttgctttaacccaagaaaccaaatttgaaatctcttcccggttctgcggataaagtgggtctccaccagttaaagtaagaccttggatatacgatttgcttaaatgggatgcaagctctttaacagtattcatagtgaataactggccgtttctagcattccatgtactacgattataacaaccttcgcatttatgcaaacatccagtgacgaagagaacgaccctacatccagggccgttaacgaaatcgcatggataaattctatcataattcatctttatatttccaagtatatcccttatgaatagattgaattcctttgcaacatttataaacagcagaatgaaaaaatcctgcatttcttatttcagttgctccagttagttctattgtatttccgtctggtgaatagccaataaccgttttggtgttaaagcgatttctagaactatttttgatatgctctttatgattagtagacaaagttcttcctgttagcccatcagatatcctttttccaaaatcatcaggaagagttactttagacctagctatgctcattagcttcttagttttatcgcttctttttgcgccacgctgattttcaaatttcttagcttttgcatacgcgtattgtgaagaagtaacttttctatgcttactattactcattatccaatatgcatcatacatctttccaccatatattttagccaataaatggtgagcagtatagtgggccttataagttaaaaatactaagttgtctaaatcatctgaaccacccatacttcttggaattatatgatgaagttcatacccggctttagtttgacggggcttagatgggtgttcagcagaattaactagatttgaatagattctgtcgaaattcattgaaccttacctcattacgtgcttctacttctgcatcatatttccagggctcatcagtttgaatagccccagccgataatccactttcggggtcacgggttatagcaattccaagcggatgcagaacctctttgttgattttccaaatcaatccccattcgctaagttggttccaatcaacttgcttcattggtttctctaacatgttttaccctatgcataatttctttgttcttaccaagattgaacccacgttcagaaggattaccaagatagccacaagtcctacgaattgtattcatcttctttggatcagtttcaccacaaattgaacacgtgaatccgttttcagtaggtgtcatctcatgggtagaaccacaagaaagacacttatctactggcatattaacaccaaaataatccaacttctcgatagcatagtcccatacagcttcaagaccttcaaggttacgcttcatgtcaggcagttcaacataagaaatatgaccacctttagcaatggaatgatatggtgcctcacggtcaatcttttcaaaaggcgacaggttttcttctactgacacatggaagctattagtgtaccagcctttatcagttacacccttaacatcaccaaacttagcttggtcaatcttacagaaacgatagcaaagactttcagccggagttgagtacagactaaaggcatagccggtttcttccgtccacttgtttagcttagtgttgatgtacttcaggacgagtttaccgcttcctttaaaagtaagcatatcaaattcatggatgccaatgtatcctaatgaaattgaactacgtccatttttgaatagttcaagaatttcatcatcaggtttcatacgcacaccaaaagcaccttcctggtaaagaataggagcaaccgatgcagtaacaccttcaagggatttaattctagttaaaagagcttctttacaaatatcaagacgttcatccagtagtttgaacagtttattactgtcatctgaacttttataatttgcatccagggctatcctagggaggttcagtgttactacccctagattattacggccatcaagaacagatttaccagaagagtctctccaagcaccaaggaaacttctacagcccattggagatacaggagtttctgaaccggtaattgctctattgtttcgagcactgatgatatcaggatacatgcgtttagctgcacattctaatgcaagctgcttaatatcatagttcgggtcttctttgtgtagattaatgccttcttctacaaacatcacaagctttggaaagattggagtaattccatcacgtcctaatccacgaatacgattatcaagaatagcccgttgaattaatttttcttcccatgacgttcccataccaaatgtgatagtcacaaatggagtttggccatttgaactgaacaaagtattcacttcatattcatacgcctggaaagcatcaaacacgtctttttcggttttagagatagcgtaatcttttactaatgctacctgatatttgcgagcatcacgcacatgtttagcaaatgtcttctctacataaggagccagaactaaatcaacattagcaaaggtagttccaccatattggtgagatgctacttgtgcagtgatttgcgccatgatagcagtagctactccaatactcttaggagtttcaatttgagcgttaccaagtttaaagccattctgcaacatacccttcaaatctaccaaacagcagttggtgaaaggcaaagctggactgtagtccatatcatgaaaatggataacaccttctttgtgtgcttccattacagagaaaggaatgacctgattggcgatatgtttagatacgataccagccatcaggtcacgttgggtaggaaaaacacgagaatctttgttagcattctcgtttaaaaggtccttgttggttttattaataagtccctggatttctaattcgatattcattttaaactcttacgaagctgcttcttgtattttgaagcaagttgtgattttccatcactttcctcgtatgtaaacccatgcaattccatttcagcaatcatctcaggtttaccaagacgtgaaaagcgtttagccatatcggcaacatattgcgggtgaatattactgtctttacgattctggcggagatagaccagcaaattctctaaccattcgaggtagtcaatatcttgaccttttaaaccagagcggttgaacttatgcttcatttggccttctgccgcattacacaggttacagagcaagcctctgacctttcctgcattgtcaccttctaacgcatggtcatggtcgaggtgattcttttgaatatcctcatctaaaggacgtttgcagcaaggacataatccgttctgtgcctgatatagtttttctttttcttctttatataacttaccggttaataacatactcttacctcagcgattagataagagtatttatagttaaattaacgagtaactaccatacatatttttagatgattctttaatacagtatgaggtgcagaacgcaaaaattccagtgatattatctgcatgataactatagacttcgttgctattcacatctacaagtttgacgcttttccatgccattccgtcaatttcatcttcataataaccatctgaaaattcaatgatatctccaactttaattccatggtctttaaagacgcttttaatctggcgatgcaactcagacaggtctaggagtttaaccttaattgatttagaaatgcaagtattagacatgatgaactccaagacgctgttcaagggcgacgatgtaatccgcggctttttgcattaaagcatactcttctgaatcacaattttcctgtccagcaaaggcataaagagctctggtaattggaacgattgcaccttggaaatggttaagtttaatttcagaaatcagaggaacatcttcaccttgaccaatttctttaatttggtgcatcgtatcttcgctgtagaaacaccagaaccaagattcgccgtgtggagttgggtcgttaatagtaatgattttgtttgtcagcaaatcaattacagcagtaattccacacatttcgaggtcatcttcgttaactacagaaatgacttggaacttaaatcccggaataaacacaggaaattgctctgttaattcgtcatcattaataatgacttcaaactgcttaccaataagtcccattcactttgtcctcataatcaagtagttcgtttatggtaggttcagaggtattataatcctcttcaggaatagcatattcctctggctcgacagtttcccagcgagccgcataccagggttttagacctttgctactttgcatggtgttggttcagaaccattagcagaatcatgttcaatacgccattcaacttcagtgcgagtaaccactttttcatggcgagaaacgatatttacttcaggaggactataataccaatcagtatgatatgaacctgaacgagattctgataccatgaaataaacatcacgtgctgggtaataccaaatctgcgaacggtcttgatacttgtgttcttgtgtccaatcgtcgtcttctactaaaacaaagatttcttctgcatcgtcgtctggagcattcggcggatattcaaaatcgtagttgtcgtcccattcaccggtgacaccagcaatccgtttgatttcttttactaattcagcgttagtcattttaacctcgcagcttctgtaagtcttcatcatcaatccagctttctaaaccagacggaagtgcacactcaatttcccacagcagttcttcaatagcttgcaagcggatgaactcttctgctgaaattgttaccatgcacggagcttttaaatcgccaatatcataactcatagttcttcctcatgccaagaacagtcaacttcaaagtctggaccaaggtcttcatcttcccaacgccaagaccctaacggattaccagcatcattgtaatcaatttcaagaccaatataactccactgaacaccatgaatggtatttccttgctttacaaagaattcaccccattggtgcatgaaagcatactgcggatcagatatagctctttcaatcattgcttcacgaagattacgttctaaatctacttggtcgccttcaggaaaaacaaactcaattgggtatttcataatttcaccatacactcgccgtatttccatttagacataaccttaactccattagagtaagttacctctaccttcgctcggtgattcttaatctgcttaattttaccagtttccaatccaccgtagccataataaagagctacaatatcaccctcccgaaggagggttccacgataatcatgcattgaatttgaatttacggagttcatcaaaaccgccgatatgtgtaccgtcaggagcaaaaatctgaggcatagttaatccaacctgtgattcacgccccaaacgacgaagcaaatcactgataaccacttcatcaaatacacctttttctggcattacattgatgaatgcatactcttgtttcttaacatcgagcagacgctttgcattatcgcaaaatacacacttatggatgttgctgtcgtaaccaaaaaccgtgaacatcttcttctatttccttaaatacttgagcttgaactgttttccaacttgggtgtttatacgctttatagacgttagtcattccaagacgcttagtgacttcgccatcaattgcagcttgggcaaaatttcttccacgggtcatagctcctttgagattggaactgttagcaatttgaccagtctcattataataaaccgaatacatgagtagcattactcgttcggcttcttccatatatcgtttacgagccattttcagccttagtagttataactaatgttttaccatctaaagcatcgagaatatctttgatgcaattatctggcattggttgaacgctagctaattgcctagcaatatcatcaggaattcccatgcgaggaatatttaatttgctaaaatcaattttatccattagcagttaccgggaagtgttctgccaatttagcagcaatggcagcgttaatttgatcagcgaaattcttattcattgcgttaacaacgatttcttgaattcggagattagctctttcaatagacatcttaatacgaccttcagcttgcttaacagcgtcatcaatagtttgacgaaccatatcatcaatagcatttttagcgcatgattgggcagcgttacgcatcatctgtgacatttcttctttagcagacatatcattccaaccgcgagtatggaacatctgctgaacttgcttcttaacttctgctcggacatctggaatagtcacagcagcaatattaacttcagattgtactgcttgttttagtttattctgggaatcttttaacaccatttctttaacgatgttattgattactgactgttgcagttgagcacgggctgctgtaccttctgggaataactggcgtactgcataagtatctaatttaatgtcaatcattttaattttctctcaaatttgtgtttacacgtacgacatttcattttcagaatatcagtcgtccaatcaacaagctgtacttgaatactaccacatttttcacaaggcacaacttgtttacatgcagcttctcgacggtcaaccatttcaagacaggcatcccagtcaattttaaattcaggtacaggtggatactcaaactcaatttcaaggtcgttatcatcaacgaccatgtcttcttttaattggtttttcacagtaagctccgggcatactcgagagattcataacgctctttgtattcgttaagcgatttaaccaaatctgccatagctaattcatgtttagccaattcagcttcttttgtatcaataaaccgcttaactgattccatttcggcagtaatactattcttagcgatttcaatatgatttactggtgttaacggaagaggcttaacaacattgagatacatatgtgctacatcttcatcaataactggggtggtgctcaatgttttaggaaaaatcttaaatgggtccaaatgtacttcaagaacagatgagttttcaccctgttgtttgcaacatgattttttaactacatccatatgatctaatgcagtacgaacttgcgctaaaagcgcccgagccggatactttccgctggataaatggctattaatatgaattcgtacagttacattgtcaagttcttcggcacgaataaatgaaacacccttaggatttctagaactagtagaagatacctggtatttcacacggtcatcgcctttaagcaagcaaattgaacgattaagaatacggcgcaggtttgcattaaattcagaacagaaaatttgagcagcgctgcggtcatgtctttcttcagttttaaacgcccctgccgcaaagctataacgctggccgtaaattttagcattgccgatagcaaactttttgagctgtttctctgctgacattgcacctaaccagcgagaacgacgaatgttttctacaacaaaaccagcataattggcttcatgcgctgccatgctatttagcacacgacgagctacattaccagcaattgctacgttataagcagctggatttaaatcatgtaaagctgccaaaacctttacgtgcttctcacgctttgacaacccctttccattatgtttatcaaattcaccggctacaaacatctttaattcattcttattcattatcttttcctctattttggactgggctcaaagagtatctcaaaatctccctgaacccattatacaacgattattcctcaagcattataactttgcttgggcgcttatagaaagcatgagttttatcatctttcgctaattcaaatgtagcagtaaattgtactttgcctctgtattcaaacggaatactttttggaagggagccgtaaaccgtagctccattctcaagtacaaccatcatcttacattgtacgccgtaatagtcttcataaacttttactgacgttacggtaccagagacagtcactcgtccttccggtgcatcccctttattcttattcagctcattgaatatattatcaaagacctcttttgaatgttcctggatagcctctaagatgctcttatgagctctaacttctgccataacaacatctgttccgtcttgtaatttccactctttatatggaatgcgtacttcaagaggataaccatactcccgaagttctttgtactcttcttgagttaagcggagtttccaccagccgtggtcacctgtatactcaggcttatccagtgaatcaaattctgtaacatacggcaagtaactgcccgcgtgataagcttcaacttcacctaattcattttcccaaagataaccatcaaagggagcatgagggcgatcatctttgccccaagtaggagctacaactttatcaaagtattcacgaccgaagcgggtcttcgcccatccagcattcaactcctcggcgcgtttttcaactttcgctcggtgtgcttggcgggctacacgattttcttcaacaagtgcagagataatctcggttaaagttttcattttattctccagtttggttgacgagaccatcttatcaacagcctcgccgaaagtaaactactttgtgaaaaattttctccaaagcagaactgcgtctctacgagatacttctactgctcctagagcaactgcttgcttgcgacgaacatcgcgcaaatcatagtgtggaactcgcttatcctggaaccaagaacgtttcattccgatagcttctgccatagcgtgtaactcatcaaggttgtcgctaaacatatgacagttctttacttgatgacctctcattttccaaccatgattcatcaagacatctacgtatactgtcatttctgattctcgatgtaggtttcaatgatgaactgtgctaaacacagaagattatcttctgaaggagaatctactaaattctcaaccatatcagaaatagttccaaaagcttcttcagtattgaacatttcttgaagttcgttccaagtaggtgctttcatttcaatctcctcattagttaacgaagctatcttatcatggcttttctaagatgtaaacaacaaaagggcccgaaggcccttaaaaagatcggaaatcactgttaaaccatggcgactggtgctgtcgccgcttaagcaatttcagttggtatttcctattgtcttctataatcatcttagaggcttttagctcttcagccaatgagacctgtttacggtccatcaagatgaggttctgggtcttctgggcaaacgtctgaatacctttgagacattccacagattcctccatccctcgtttatacttggttcgggcagcatttaactgcccttcgtaatacgcatgtatagacactatagtactaaacaccttttacctcaataacatctaagataatatcttcaacgtcttgctcagggaatgccacgccattggtctgcccatgctgaaatactgcttggtacgctgacggcgcagaaattcgggttgaacgttctttattgtcatagcatttgccatcaataaagtgtttaaatttaacttcataagtttttaacattattacaccttagcataattgacgatttgttcacggtcagcgggccaatttaaatcagaacgtttcttgtttgaccacgcaatattttcttcagcccaatgaagtttagccgatacgctcttttgtacgtctctgatggcttcttcaagataaatgcctaaatctctcgggttagttccttgagttttaaatgcattgagcaaaatatttcttacaacttctttaaattgattttcaacttccgggtgaataaattcacgatatccgctgcacggatatccaaaagcatctaccatacgagtagtactaaattctttgctcataatccgagggcctctcgttcgtcgggatttaatttcgccaaagcggcttctttaattttttccaaccgtttacgcttagcttcaggtgtttcttcctgaacactaatagcagcgcttttaggaaaagtccatgattcgccattttcatcggtgaatgtaattagttccgttggcttacgattaactgtaccatctgagccccaccaagactgtcccttaactgcttcttcggcaacgcaatatgaaccataataaccaaacaactcactacggcgatcgtctggtgaaacatacgctgcataggcttcactttctgtcattacccatttcattttagcacctcataacgaataagttcaatacgatttttaagctcttggtatgatttacgccaaggcttataataggcatttaaatcttggtgctgtttatgcatttcgtctaaatgctttactgcatcctgcacatttgcaaggaaagtatcaaatactttattagcgtattctttcctgagctcaatgaacggaggagcacgaaatacgtttaccattacacgtagttcatgataagaagaatggacttcagctaatacattcttcttatcgccaaaattaaacttataaagtttttcacagattgcttcacaggctttctctgctttacccttgggtttacccgcaaagatatgaccaggcggatatactttaatatcgtttaaccaacattcaatatctttaatagctgctaaactcattgtacccacgctccattttcatcaatgtaattaatccactcgttaatagtccaggaagaggtatcacctttaggagtatcaacgatatacattccgcctttaaacaaaacacgttttacatcattagaaattaaagtagccattatattaattttctctcaatttaaattcgtttatcatagaaccatatggctcatcaggatatccattctttacagctaacttattaaatcttctatacccaactttaccattatttttccatagcaaatacagctcttcaaaaaatttccaattctcaaggtgggcccgtttagctgccttaattcctgcgatatgccgggcctttacgtcacttcttgctaatgccttaatggtattatttctttgtttttcttttacctctggacgctgttgggataatttagacgccatcccattgcgggcttttactataggatttgataaagttttcttcattgaagctgacactttatccctatgaccgggagtagaccaaagctttttagcatgattggaattctttactctagtacttttataaacagttccgccttcaccgccatccgataaattcatacataatgaaccgtacttaattttaccggctttaatgtatagtgcttctgcgttagaagcaagttcatacgtactaaagaattcaagttttcttacactaatcttataacgctcaggatattttttaacatgacgcatataatatcctgaacctgaatacgaatcgtttaatttgttacttctatgttttccgaagtagtgtttaactactccggtcttaagattttctatctcagtgtgataaatgtaattatattttttcataatattatttatccacggagttgggttacttcagcaatttcacgccaatttttacggtcagtcgcaacgaaatcaccaatataaagagcagtacggagagacacgttacgcagacgatttacgttatctttcataaattccaaaacttcaataacttcagaatttcttaacccacggttctgtaacatagaagtggtcattactacatcttgaacgcggaccataatctcttcattagtgtgaacaccaaggtcaagataaactgaacgagatactaaagcgttcaggtgaggagcgagtttagaaccgcgctctaattcacggtcaatatcaacgttagtgataaagaccacagtaccttcaaactcaaactcattaggaattcctttatcttccaagaaagaagatgcagtgctccagcatactttacgtttctctcctgaatccaaagcagctttcagaaggttaagaatgtccatatcagagaatacatccacatcgtcaataagcagaactgaatttgcttcacgtgattcccagagacggcagtataaaccaattcctgagattttaccgttcactgatttgtaatcaatagcgttagtatcatgagcatgttgtaatgctttatccaaagagtaagtcttaccgatacctgctgctccggagataatcagagaacgaatgttcccgtggattaaaccgttagtcattaatcccatgacgttaaagcgtttcttgatacgctctttcatttcatcaatggattcaacaacttcaattttagcagctactccgtcaattgtgatatcatctttgaatacccaaacaccacgctttttgccattcagttcaacaaagactttaccatcaccctggcgagaatcttcagcacttaagctatccgggaaccactcaccgagtaactcatacgtacctgaaatctctttgccgaagtaaatccctttcttgatggtgatagttgacattttattctccgttactctgttttgttttgatggagctatagtatcattctacagctccaaagtaaactactttttaattatttttctaaaatttcgttgatgtagtaaggacggacctttgaaccgagatagaagtcatccacaaaatcaatcaagttgtcagtttcaccacggatgatagcaagtttagagaacgcttctcctaccatcattggttcaaattctacaccgtgagcttcagcagctttaaaggctttatcaatgttgtttacgacgatttctaaagttttcatcttattctccattgtatctgtttgggtggtacatgtctatagtatcatcagctaacgagcttgtatactactttatgcattcttttgaaacaaaaagaggagcccgaaggctcctcagttatgcatgcttattgatagcattttctgctatacgttttggaagtttacctgcccagcggaagaacatgataatcgctccggcaataaacgcagggaaccaaaagatgagataaaaccaatactctcctgctttctcgatggttccatttttgattagatgcttacagacagaccaacccacgacaaagtaaattattgcaataacgattggcactactacgctccacagtaaaatcatatttcagcccagtaaagtgagaaccggagagtttctccggcccatgacataaaacgatgtacttgttttcgagtaggtcgagcagagaacttagcattcactctacgaccagtctctctacaaactgcttccaagtaccaccgtctacctttatgaggtcttccatagttcaagaagaccttcattgtatcatttgtagtaagaattgtggttttcaagataaaccttctcgacgaaatcgtcccagaacttcatgtctactttcttaggcagtccgttcttctcggcttgatgagccaggcgttcaactgcgtcaacggtcgtttccaaaatatcctgaacttctttgaacggtaactcaccagctttgattttcttaatcaagggagcctgtgtcagaggatatttaaggtcaccggaggaataaatctcctgcagctgaagaccaccacgaagggcatgactcagtgctttccaatctacaccttcgttagcttctgccttacgagcgcgttcgccatattcagcatcaagcttctcaagggagtacttcatttccttaaccgtgatagttgtctggaatttacgacctaacacattatagaaatactgctgacctgatttatggtctgtaaaggttgtccactcaaggaattcacctaccggaagacgatcggcgatgtccttaactttccaacgctcgttaatgcctttctgcttggggcgatcgtcatatttccactcaggaatatctcggataacatccaggactttatgcaaatctgctaaacgagaacccttaacaccatacttaccagcctgcttacggacatatccaagataagccttcatgtccgtggtatagaaacgggctcggttgtcttgaatgaatttccatacttcaggaaggtcagatgcaactaccaattctggtggagtatgcagcatatccaacgctacagtttcaccatcagcagcgagcttgaagaaatactttaagctgaacagctcatggtcaatgtcatctttagtatttttggttgcactgttattcgtattacggttagtatgattcatcgcttgacacatcagaatatcacgcggatgaggcacaaagatttctttaaaatccacatctgattcaggagttgaagtaccatacagatgcgaaccaaaataagattttacgattgttttcataagtaaatatgattccctttagcgaatttaactaatgcattagaacgcttgacggcttcttctgctcgagttttatcagtagttctttttgatgtacggtaaacattaccaattttttgactggtgtaataatacactacctcatgagtatgatactcttgtccatcaggatgctgctcacgccaggtgtcttcgcgtaatgttgtttcatacataggaactaatgcccaatcaattcctgtgctaatgattgccacctggatgtcaagtctgttccagcgaaacgcattgatatatcctagtacccgtgattctgggtccatcattgcgaatttaatgttttcggctgaagctaatggcatctgtttcacaatgctcatactaagttttttcttagtagttacgagttcaatttccatgacccgccctcataatatatgtctaaatcaatgttatctttgccgctgtacttgccagtcaaaggaataaatttaaccgtaaccttttcgccgtcatcaaaagtaaattcggcaatagggtatgtagaaattataccacgttcggttttagcacgaaagacggcccgaaggccgttcacaatataaacttgatcattcttcactagttttaccttctacataatcaatcattgggcagactttccgcttacgggcttttaaatactggacaaataccgatggttcggcttctgccggaagaccagcttttactcgagcaagttttttggtatactgtttctgattgcgatagcgtttaaatttttctaaaccaaaaataaatccaaacgctatagctgcaaataaaagcacaaatactgctataaccactgcgccaactggtactgctacagcgtttaaccaaaacgcggataaactaatacctatccaagagagaattcctgtctctgccacaatcggccaaccgaacatccatgcaacagaaccgatgaatgtgataatcgctgaagagaatagaacatgaagtactgttgtccagaagtatccacatagagtttttggcattttccacatgttgtcagatttaaaccacaggttcattttgaaatgccaagagtttttattaatattcattagttatcctgtttcatagttggaatcattgcggtaagatatttgaccagttcaatagcgtcgcttttatcaatagctacacaatctccgtcacgttcaatttcgatgatagtattatgttcatacgtgtggaataccgtaagatacaaatcaataacatgcgggctttcatcttcaattactgcatcgcctttacgggattttccgtcccatactaatttactcgccatcttttgcctctatcaagaattgaattaatgaatcaatttgtttagtgtcaagatgaattatatcattgccttgttttagcacgatacgactcaactttttagtgaaatacgaattcacaacctttacatgcacatcgctgtacggattatctaaattggtactatcaagaatactttccataattacctcaattgtgaatcttttgaaccacgacgattataagcagaagtcattactgtatcccactttccttgacattctacacaccgttgacagcctttaaccaacagacgacgagctactgggatttcctcatcacaatcaacacagaactcttcggattcccgctgttcttggagttgtttttgaagacgggcccattcaatcccgtccgctattgtagcttcgcgagttgcaaatccgtcatctgatgggccccatccattcatttcaaactctccagaatcatttgcaccaaattatatgtaaacatcggatgctggtattgtaccacaatatagatgataagtaaaacgtttctcattcttcgccatcatcaaagtcgtagtaatcataatcacaactgtcaaggtaagaatccataaattctttctgacgacggaagtcttcaataggagttaatctgtcagcgtatgcttggtcatctggatcgctgaacttatcttcttgcaattctttaatgaactgttcagcttcttcacgtgtccaaaacccacgattaagattatgaaccgaacgtttttcacctggcttgaatacgcccatatcatgtgcagaccgctcagttgaatagctttcagtttggccagcatagttttcatattcgcaaatcacctggaagaaaggagattttcgcgaatatacaccacgaagaccaagttctacatcatacgtgcctgaagcaacaatgtaacgcgttatttcgccgcttttagtttctgtgcgattaacaccacacacgtgataaaagatttttccaggttgaagctcagtggttaacttaatcataatgtttttctcgtttggttgttgatatgtctatagtatcatgtaatgaagggaagtaaacaactttttgaaaagaaaatgcctccctaaggaggcggagggtattactgcaatgataacaaatacttagtcttgtagcatagacctgtaatgtcatccagaacactttggagggcggcaggaacggacttgtagataccatcggccttagccagaatgaagtctagcatttcaatggtgtcctttggcagctctttctgcgatggtaaagccggtgtataactcttacctgagaatcctaaccactgctcaccaaaagcatctatcaaatctggaatctcgttaaagaaaacttcatacgctttatgcctggcatacgatttggtatcaaaatgcgctgaatgaaaatacgcttgagacgccataagtaaaccgatgaattcatcttgtggagtaagtttaccgtcctttacaaaatcattgaacttcattatcgagttgtatcctcatgcggttagcatattcttcacctgctgaacgtcctaaagaatcgcaatctttagaacaagactcgctcttccatttactttgtacgaaagcatagaactgttcagactcttgcttactaggctccttaaatttagcataaacttgtagagcgccctcaacatacgaattataatctgaaatgtcgtcgtgtgatgcagctgggaatgaaatcccgcagcccaacaccagggctaagcaaatgtgattaaaggccatacggcctcctattatttttgtccagtattacgtttgtgctgaagtacagccttaacttctttgaggtatttttccagcttacgtttacgggtataatctgcttttgaactatgttgacgaatttcttcctgaaggtgcgaaataccatgcccaatctcacgacgaagttcgtccagctgctctacagtaagattacgaagttgcttttcacttaaatgctgcatatacacctcatcagttagtaatagtatttatataagtatgtgttacttaatcccaaagccattcgcagatgccttgctcaatggttctagcaccagcttcgtcccagttatattcttcatcatacttcagtgcgcgtttaatttcggctttatgaaataaacgcggaaccggcatagcataacgggtccaacgtagagttttccagaatccatcgcgctttgatttagcgatcagtttcttggcctctaacggtctttcccgattttcagaaatacgcaattctacatatttctgctggttttctttatctttctgagttttaacgtattcgttatagcttttaatataagcaaattcgttattattctgatcgttccatttggaagattttactacatgccagcctttgtggcgaattgttctagacattattacctcgttaagttaaagtacctcaacgatagtaaaatcctgatttaaaaaatttaatattcatgaatagattaccttacatttacatttaggacattcaggttctttatttttaagacgcttagtagttgtctttggagcagtgttgtaatcatatacatgaagacaacggtagcacatcacatattttttcatattaaaccatcaacgaaagcaatattacgtacagcaagaatccaattatgagtactagtactataccacctgccatggcaaataatctactcatgtttaatataacacccattcgtattagcaataaagtctttaccttgtgctaatactttacattcggaattaagacgattttgcatttcttctcgtctatcactttgtatagatgctgctacaccaatccaaatgaatagcatacccataattagcatcaggatagtgttatacgttcttggcttcattataaacacctaccagttcgcaccagtgtttacgacaaagagaaacgtatttgtcttcaccaccaagttctactacttcaccatcggtaatagcatttccgttttcgtcaatacgagctaccattgtagccttacgtccacagtggcaaacgcccttgagctcaacaagtttatcggctacagaaagaagagctttagaaccttcgaataactcgccgcgaaaatcagtgcgaagcccatatgccattactggaacatcatacaagtcaacgattttacatagctgaagaacatgttcagcagtcaagaattgtgcttcatctacaaatacacaatgaatatcacgttgtgtttgtgcccacttgaaaaattcaagtatgtcaatagattcgtctactgtattagcttcatgacgaagaccaatacgtgatgttacctcggtggcagaatctcgagtatcaatagcaggtttaagaatgagagttcccattcctcgttctttgtaattatgcgccgcggtaagaagattagctgatttgcctgcattcatgctcgcgtagttgaaataaagctgtgccattaaagtgtctccataaaatcagaaatagcattcttagaacgaatgagttcatcgtattcttcaggtagaccatttccgtaaatggcactaatagctactacttgctcagcacctgcataatcgtcaatcaactgccatagtttagttttttgctctttagtaatcatctatttacctctaacaaaacagatttagcttttagcttcttcatattctaccaccataatgtcaatatcaggtgttgctaaattgattaatttctcaattagttcccaatcaccgccagcaataccagctccaatttttggaatgtacagaggacgattataaacaatacggccagaatttagttcatggaatgcattaaagattgcaccataatctacgttaggacctggctcatattgggtgtatagattataacaatatgcagtaccatttttatgagtagctcgggtatgagttccaagcttggctaaattattatcgtaatagcggtcttcatcgatgtcaatatttaaaatcggcggatatgctttagcaagctgtccagctacaccggcacccattgtagtaaagcaattacatccatgagcaatatcacattcatgcttcatgaatagttctacaatattacccttgatatatccagtaatcatttattcacctacggaattttataagttgcatattcattaagattattgtatactcttaaaaatatagcattgttacagttaaggatagggtttaacacgccttgttctttagggtgcattactccgtcaatagaaacgccgtcactctgcattccacatccacgagcgttatattcgacaagtggaactattacctggtcatctttatcttgataattataaaatgacattagcaattttctactgctaggaacaaatgctatttcaatattgttcttgaatggaccattactttctattttagtcccctgcgctgcaagcacagtttcaggatagcctgggagcttttcccaggcattaactgaaaatgcgcagcataataaaatagccgcttttttcattttgacgatagtcctgacatataacgagccattaattggtcacgatacattaaacatatattttcgttaggagcattgacacataaatctttcatgctcttagccttacgatttattagtgttgtccactgggccgggctacgtgaatcttttactccatcgctgaatgctgaatctaattcaagcgctaatatatcaacacattcagagttcgtattgcaaaatgttttagcgatacgaagtgaatctgtcattgaattttcagcattagcagagaatgccaataccaatccaagaagcgcggcgtactttaccattattccacctttgtatgtagcattttatgtttctttaagaaattagctttctctaggacatctgatgcataagagtttcctcttttgacattccatcctgcgttataactagcaagagcttttcgcatattgccgttatgtatatttaaccaatatgaaagctcaatatatgcccattccgcggaattctgtctagatttaagcatttttcttatttcagaatcactaaggtttttgccctctaatttagctctggctttaaccgtaggcaagtaattttgaaataccccataagaatgatgcccctttcctgcttttaaattggctcctgccgaagattctttccatgatatagcagccattatatatcctaagccgttattatcatatcggttatgcggagatttttcttttccggatttttgatattgttcaccaaaattatatgcgtaatgcaagttgtcaagttgaacattactgaaagttggctcagacccaaaggccgttgaacataaggccattagaccgataagcgcttttttcatgtttacctcaattaatgtgtataacttttgtgctgattttacctttcaaacgtttatcattaacgaatgccatacgacactttatactaggtccttttcctggtcttggaatatccatggtaaatcctagccacagatttccatccgtaatttctaaccgcattggcttatactcggtgttttcatcaatgtcctttgggtcaattggaagccaaggcattgctaagaattcattaatttctttaagatgattaggaattttggaaagaacagagaatacatactcttcatcaatttcacgttggatagcacggtccaacaaatgatcagagtacttagtgaagaaaggctctttaccctcagccttagctcgggcacgaactgataaattcaaagagcgaaaagcttcctcaaacttacgacgcagtttagttctgcgaatgaatacttctgggttagttgacatagttcattctcctttatttgtagggccatagtatcatggcccgtaaggaaagtaaactactttttaatatttttcttctggacagaacacggcacggcaagcccacatagaagcttccttcagtttctgttttgctgtacgaatctgggcaatacgctcgtatgcttcatcgagtacctgctcaggttcattgactgacacttggtaattaattaatgcctcttcttcaagagcagtaaagataagaccaagacgtacttctgcgtctttgatagcatttactttaccaatcttttcatcggtatgtggcttatatcctttaatatcttcaattgacattatagtgcctctgtgaaagtacgggcgatgacgtcgcgttgctgttccggagtcagagagttgaagcgtaccgcgtagccggaaacacgaatggtcagctgcggatatttttccggatgctcaaccgcgtccagcagagtttcacgacgcagcacgttaacgttcaggtgctgaccgccttcaatttttaccgctggctggtattcaatttctacttcacgagccttgtagccataaaaagtttcagcatccgtaatagtatcttctttaagaacttttgaaacgattactcgtgcgtcatcgccatcttcgatgtaaatggtgcctttaagttcaccttcaagaatttgatatgctttcatatttcctcttaattagattctttattccaaccacgcatgtatgcggtaattacactcattttattccactcaagtagaattactgaaccaatcgcagaagctttcaactaaatgtggaggacactttataacaatttcagccattgcattgttttctcttgaatgcgttggtcatatgtgattaagcttgaactaatcacgcctttgagcttgccggatataaactcaattctaaaattaggatagcgattcatccacttcgtgttaggagcattagaaatgaattctgcgcctttgaacggaccagacagaaacttgtagcgcttgtactcaagcaggttgccagccgtaaccattgttattaattgcttcatatcggcaaatcctgtattttccattactgtaatcatatcaacaatttctgtctgtgtcatcattgcattcctatcacgaaaaataaaggtaaggtatcattaggcatagaccatctgatagcttcctggtacatatcatagaacttcatcatatcgggaactttcattggttcttcaatgataattaatgctcttccaaactttcttcctctaaacttataagaggaatcattggataaaaattccctgattgtcatcggaacaattgatttagctatctcgttagccggtaatttattaattaaatgcgatgaattatattctcgtagaataccttccatcagttcagatgattgtgtgtatcgagtagataagattataaccgaaccatcttcaagcaaccaatcggtagcgaattggcataaggctgtggtctttccggtttgtcttccaccgtctagacgaagggtaccgtactctcgcataaggcaagacggttcataaaaactgtagttgggattattcaatcgtctgtctgcagcgtctctgaaagcatgcatcagggtcaaataaatgggagttaagtgtttcattttagattccagttaaaggggccattccttggcacatgtttaatccatcgacacactatgtaaaccccttaccgcacttgcgctcgaccttattacaggtagggaaagctacttcactcagaggactcgacgttcatgaggagaggtcgtgttcagctttattaggaattagttttaattacgggctgcattagcaacggcgtaagcgtattgaacattagcgtctttaaacgtacctttagaggtatctaaatctgccttaaatccgcctttagtcataatctcggcgaattctttacggaaggccatggcgtcaagatttttccaggctgccttatgcttggcaaattcacgaccagcgaagttgacagccttagccaatttattatcaataacccatttaccagctttaggcacaaacaccgggcctttctgcttagagaatagttttaaattccagcggcgaaggtctccatcggctttaacaaaatctgcgtccaagttactagcaacaacatcttgaatatggccaaatttaagtccatcagcttcaatatttaggtcgttacgccagcgaagtccttcccaggcgaaggctttaaagtcagaagcctttgtagctaaataccgctcaataggagctgttttagggtcaaagccgtttcctcggtaggtccactcatctttattaatgccttggacctttcctacagaagcttcggtgataaattctttataggttttcattttatatcctttaagttaatgcgtgtcattttagtgttctctatgtttgtatgagaacactatatcacaactatcgtaaaagtaaactacttaattgatttagcgtaacgaatagcgccgcgatcgtttacgaacgcaatcttgccattacgcatgtacatggtaacagtacgttggtaaccgttagaagttttgccagactgataacctactaatgcaaagttatcttcgccaggtttgttctgcttagacttaatacgctcatgaccaagtgccattaaggagcgtgcatcgccagatgctactgctttgcgagaagattcatcttcaaccgaagagacaaaatcatcgaatgaatcaaacttagcatggctcttattatataacttgccgtctactacgtagttatatccaacaacgtccatttcaatttctgtgccatcttctaacgtggcggtcatcttctggccttttttaaatttcagaagattacttccaacagattcagtcattacgccaactgttgctaaacgggattcatttaaaaattctttataagttttcatttattttccttgataagcggcccaagttccggtccgcatagtttcaattacacgacgagcacgattaggtgtctgacgataccaacgtgaatttgccagttctttggcagcagcatcccattttttagcagctaaaagcttcatggaagcagggaatccagcaacaccacctacacccatttggaataccatgttaattagagctgctctacgaacatcatctaatatattatataccgggtttaatgtagcattagcaacaatgcctttaattgccttctcaacatcctttgcaaaaattacttctgcctcagcctgagtaatttggccaccggtagaacgacctactagcttgtccaggttagaaatagctaaagattttgacgggtctttagtcagtaagtggccaataccaatggtccaatacccttcggtatctttataaattttgctgtcatatccttcatcgatacgcaacatgccaaaaatatccataaggacctcctattaaattataggagtatttatttggccctacacttggctatgaataactcaaggctacacttctcgtatggtgtccatttacctttccaccacacataatctcttctatcgtcctctggaatttcattaaatcctggacataacttttctgccatgtaatacgacgattttgcatactcgctatcactgaagacataccgtgacttcattagtgtacgtgacaacttatctcgaggatgaaatatgctaatccatcttccgtcgcgaacaaatcgtagttcatgcttataaatgtgtggaatgcctaattcaatagcttcttccataataacctcaccgagatgtgctatacatttgtgtcatgattttgtataaacttggacccattacatatttccattgagaaggtttaattaaagcaaatgcatcgatttcaggaaaattaattccattttcatctttatggtaagctgtacaacggcaatttctgaacatttctgggctcacagggagcatatatccaaacagatggatatccttattgctggcataatcatgtcgtccaaggtcatataagaggtcctggtcaaacccagtaaaccctgtttcttcctggcattcgcgaatagcagcttcttttggtgtttcaccaggctcaacatgtccttttggaatatcccatctagagcctctaccctggacataggtatttgtcatacgacccatgaaaagccgtttgtcattggtaaagaataaaattcctgcacttagctctttcattggcattcgttccaactttcttcaagaatatcttccatggcagtatagaccatagactctagtacaccatcacagttatatgaaccttctaccgagaaatcacagataggtccattaataccaagcagttcttctttgagtgaaatctcgataccgctcagtgattcattatcactgtaacacagaaggcgagtatcaccattttcaaattttacatgcactgcaacagccattatttcatctccttaatccaggataaagtttcattgcgagagtcatctttagatttttctttctttactttgggcttatcgaatacaccccgctggcgctgggaaacgaattgcaaccaccgggcaagtattgcaaaccaagttccaacacctgacatccagcctatgtaatataacgcatcgccaaatactggagaaaagaagtagaacccccagaatgttccgaatccaacaaaggctgataatgaaaaccagataagcagaaataggaagaaatacccaggctcatcgcatttaatcattccacggtaacaagtcttaatcatttgcggcagctcctaatccaggcgttaaactcttccttttctttccacttcttgtatttcattcggtaaactaaaaatgtgcagcaattaatcaacgcgataatcagcatccacatgaggctgaatgcgaaaacacctaaaaataaaagcataatcataaattctgagacgttcaacccaaataatgtccctccaataattacgaaagcacaatataaaatccatgtcacgattccaaaagctggcgccaggccgtcttggttccaaaatccatcaggtttacattcattcattttcttctcacctctttaacaaactcaagcgactttttgcgattccattcaagggttaaatttttgcattgctctttccattcagcctttctttcacagttatgcttaacatactttacccaacgaaatagctcaattaatcccatgatgagcaaactagttccccaccatgcaagcagaattccgaataacactgccggtgtaatatcagttaactgcatgataccaatcgcggtaaaggtacacattgcgccgacagttgcaccaataccaggaattagaacatagtcagtttggtcaaatttatagacataattataaacgggaggttcgcttggcagatataagttactcatttctgcaccctctcacggcagtatttgataaattcatcaatgattaattgtttgcctaccatgttgttagagtcaaacatactcataacctttggtggcaattcattaatgcagtaatttaagtaattgatgtaatcatctttagatgtcacatatttaactaggttaatgccaagacgatagctatttttattatgaataatctcaataactatggtgtacgttgttgaaccagagatagaatatccatcggcattagcacgggctgatgttagatttgatggagaatcgttaaaagaataaattccgtaccgaagtgcaaagatatctacaagcttaactccatcggaaatagacgaaatgctagaaattaagtttttcagcttagaatagtctttaagaacgatagctcgcggcaaaactgtagtgttatacccgttatagcgagttttccaattctcaggccgagtatcaagacaagcaaatttctcgagaatatcagtgatttcttttgggaatcctgctgcaattaattctttaatttgaggtgttgccattggaatatctccagcacattcatataacattttattatccaaataggggcccgaaggccccggtagattatttcagagagttcagatattcctgaacatcggcagaggtggtttcgataccaggctgactgccgttgaaggtttcaactttcatcatgatatcttgtacatcaaccttagcgagttcagcgatttcaatcacatcatcggcagaggtaatacccagagcgtttgcattgcgagtttcacggatgtattccagtttaactgcaaggtccagacgctgttcgtcgagcttaactacagtttgctcaatttgtgcacgcatttctttatattcagcggctttggcgcggagagcagttgcggtacggcgatacagaagaccaagcttagctaaagtttcaaccggagcaccttctgcaagaagacgacgaatttcacgctctttagaagcaccagcctggtctttttcgtcggcaagtttcagcagacgtttttcttcatttactgatttaacatgcgtggtacgcagtttagtaatttcatcaataatacggtttgctgccatcgtatactggtcttcaatagaggtattctgtgcaacaaaggtaccaaatttagaacggatgaattcaacaagttttttcagaatagacattttatttcctcagtaggtagggagttcattataactccccaaaattattagcagttaattactgcttcaattcgtttggttaaagcactagcagtttttgcgaatttaatttgaacagtttcggtaggagcttcttcatggtaaactcgaacgtagtactcttcaacagcaggccaatctttacgaacatgcttaatcaaatctttaagttcacgagtttctgctacattgaacactgcgtgttcatgttcacctttaatccaaatcgcgcgataacgatcaggagtaccgtaattgttataaccacgttcaatttggataaagttgaatttagacattttattctccgttactctgttttgttttgatgtagctatagtaaccgagttgactagcgttgtaaacaactttatgcacaaattttcaaataattttagggaatctggaaggactttctggagggtagaatggatttatacagcttggtatatagaaatgcccagacgacctctagaaggtatctgggctataattgcggtattatcatatactaaaaagccccgtccgaagacagggctctgagaatcgacagcatcacctactggcagatgacctgctaaattcattcctttgaactcggaggcatcagtctcatccaaaggagtatagcgtcaggaggttatgcttgcgacagggaacaaccgactagcggcaatggacgaaccattctcttctatctgacgactcaacgagggcatacgcaagtttcccttcgaatttggtgccgattgcaggagtcgaacccgcgacatcttcattacaagtgaagcgctctaccagctgagctaaatcggcataagacggaaataaggattcgaaccttatgtagttgcacagacgtatctgccgttgaattcctcactaagtttaagcaactattccggggtcttaatttggtgcaccgagagggattcgaaccctcaatccttgcggcgtagcattttaagtgctatgtgtataccagttccaccatcgatgcgaaatggtcgaggcagaaggattcgaaccttcgacctgcagattagaagtccgctgctctatccagctgagctatgccccgagattgttcaggcaggactcgaacctgcacgcttaggtctgttgcaccggtttccgccttactgactcgggtaccaaccgagggttcaaacaagctattccggtcgtgtctaccgatttcaacactgaacaagataattatattactgattatttatagcatttctcaaacgataaagttgattacagaattcgcgttcagtcaaaatcgtttcagaaattttgtttttgcccatactgtgagtgagcgtagcattccgggtagcagccaaagcttttctgaatccttcatttttactaagtgcatcgtatgctcctgttagtaaattctgatacgcttctgaggcacggtgaataggaacacctttccaataaagcgtttgtgttggccaccaacgtttcttcttacctttgaacttagcggattttccgactagtgtacatacatgtgcttgcatttcaggcgaagaaaatttgagggattgcaagaatccctccattgaggcacattctacgccatcatagataaatttatgaggagcaaaattactcaaagcacatgatggatatgaactacctgaaccaatatccattacttttccttcacgtatttcaaccaatcaacttttaatgggctttctttctgcttatacgtaattccaacatggaatgcaaccggagcatcaggaatacgaatttcttctttaatgtcaaagatttctactttctcaaatactcgcatgaaatcatagtcatattcaattggattacccaaccaagcctgaatagcatacataacttcatttgaacaagaatagtggttatctaaataagcatcaaactcttcgtctgagcaatcatatgcaggaacatcaacactaaagaatttcttggaaaattcaggagttacatacttctgttcagtatgaagcttttcaagaattgcttcatggttgtaatcattatttccaagacattcaccgcggcggccacgagaagagaaccattcaagaacatgaattacttgattaatctcttctttttctaagccataaaccatttgggtagaatatcggtcggcatcattttcccaagtggtaattgccattgctaagcctttaggaataacttgtccaaatttaatatgcatttcaatttcctcagttgataatttggtgaccctggcaaagactcgaacatgcaaccaatcccttatgaggggaacgctctaccaattgagctacagggcctttatagaaatcttatgacttttataaaagccctccgaagagggcgccttgtcgggcttatccacctgctaggcagaattactcacacataaaatcagctacttcccagaagtcatttttaactgctactttaaccaccggagaaatttcagatgttttaatagaaacaattacatcacctgcgacagtttctaccagaccaacgattttctcgctgcgagcaacaaatttactcaccggatgaaatttaccggtagcagcgaacatagcttcttggtcaacaatcagtgcgatacgtttcattctttttccttgtttgttttgatgtagtaataataacaggttattcttgtagcattaaatctcgaaaatcgttccgttttcccacattgttgcgaacataggagaaaccttaacgaatgatttgcttcgcattgcaacgtagtcgttatctactttagccaatcctgaagaaatatcagtaatacggccacacttcatagaaccgcgaccacctttattgtatgtgcgttctccgtagaaaacgatatcaccaacttgtacttctcggcctttagaatctttcatcatattttgcctgctgaatttgtttaaaatcgttaacaagttcttttgggtccgacgcattgttaaatggaagaacttgacgtagtttacttactttacaaccagagtgataagcaataatctcttgaatatcacgctcactgaagtattcatatttaatcagtgaatcatatcggcatttaatccagacccacatacctttgcgttcatcaaatgcatatgcaaagtcagcgttaatcattaaatcccgtttagcacaagatgaaagccctaatgctaaattaaccggtccatccaaagacagcttcaccgtaatagcatttacgtcatttgatacaccaataaaaatattcattctatttccttcgcttgtttttggccttcttgtcgtgcacgagaacgtcctgctttatgcagtgattcgtaatatgctcgacgtctatcaatgttttctgtacgatatgctttcccgaaatgggatgttttgaagccgtaatatttcataatataattctcaatggcaagtgattggacggtatgcccggcctcgaaccgagtcacattgactttgcagaatccatgtgtttaatatatcacccatactcgatagcatatctgaacgagactgcaatcccgctactcagcttacaccatcttgtattgtgtcataccgttaatttggtctccatagaatgactcgaacattcgacctctccatcccaaatggagcgctctaccagactgagctatacggagtaattttgatttaaaattcttcttgcttgagtgtgacttacaccaatatgtttagcatatttagataattcgcctcgtttagaaaaatcatataatttagaaatttccattctgtaagctctttcatctgtactaactctagctaagtttaattcggatatctttttcttgaattcagccgaattgtgttttcctgcaaatccgcttggcttaccagccatattatctttccatgtaggtaaatccaaggatttcactgattttgaaatctttttcttatgctcatctgataaaggtttattagcacaggattttccaacttttgacatattagttcttcgttgttcggacaagatttcattattacatatgtggtcccatccgccttcaccaccaagctttaagttatacgtatcaggccttttaataaattcttcatttactaggtgtctttccgcatcatacatatctttagcattatcaaaagtttcgagaatttctttttcaaaattttctttgccgtactttttaatagcacgctttaaattcttaccagaacccatgtatccatcttccaacttagaagtagaatgaactccaatataaaacttttgatttattttatttgtaattttataaagatagtaatgcatatcagttcctattaaaagaaccgagcgtctctcgacgagtcacaatttggagcatccaaagggaatcgaacccttatcaagtgagtggaagtcacctataatagccattatacgatggatgcaaatttggcaggccctgaaggaatcgaaccctcatcactgggtttggagcccagcataatagccgttatactaagaacctgttatttggtgggagtaactggactcgaaccagtcaccgctcgattatcggtcgagagctctaccaaatgagctatactcccatggaaagctaatcatctaattgttgatgtaccactgctatgggcagcgtttaactttcataaatttggcggagagtaaaggagttgaaccctcaccgtttccgatggcccggatttcaagtccggtttgctaccactagcgctactctccagtatttggtgaaggaagtgtcatatagacacaattcgcttagcgacagccacagcgttttgcgggccgtgtatttttccaccattccttcattgttggggtgaccggacggatttgaaccgtcgacgacagcaatcacaatgctgagttctaccaactgaactacggccacatcaatattcactccatccatcatgaggacttcatacgaaattaagagaagaatgatcagttcaacccctgtagacgcgttgaatgaatattaatttggctggactatctggattcgaaccagagataccggagtcaaaggcctgtgacttaaccgcttgtctatagtccaattatttggaggcggaggcaggactcgaacctgcgcgtgtcgggatatgagcccaacattctaccaactgaagttaccccgcatttatccgggttcttgaagtactaacaagtagcttgatgtagaacacgctaaagatataatcttacgaatatagagcttattccgtgggaacaaacagcttcgtcctcggcattatcttataggactcaaactcatcttcaagaactgccacgttcttatttggcggacctaacggaattcgaatccgtgactctcgcgtgacaggcgagtattttaaccgctgaaactataggtccataattcgctttcagagatactctggcacgatgccgaagcaaaggggaacaggactctcatcaccttggtaccagatgaatcttgtttagcactctgttctaagatgtatccctgaaagcgaactttcaacgccgtaagaaattataacatgaacaagcattaagcaggatgaaatcatactccttaatacaaacgccatgccagggatttctgtgccgacgattttatcagaacgtcttctgacttcttcatttggcgggccgtgcaggtatcgaacctgcctagtcatttctgacacggattaacagtccgtcgcttaccctctcagccaacgacccgaatttggtgggacaccgaagactcgaacttcggacacccggattaaaagtccggtgctctaaccaactgagctagtatccctaaatttggtggggagtaatggagtcgaaccactcgagccttttgagcaacagatttacagtctgtcccgctacccctacggtctaactccccagtgggtaattttatttatactgccctaaaattaatcagagcagttgatagattaataataacaaagaaaacctaaagcatattacacaatcggtgagctctttgatttaaccaggaataccctatgtggtgaatccatatgagagagcaatacccggtgctcaggaattggacttgtatggaaaggaaccacacgataacctttaggagtaaatcctagcaaaataccaacgcttgctgcagaaagtgacccgccgcaatagtatgataccaaatcaccaggctggatttcattgtcaagagaatcggttttgacatgcttaggcgtaactaaatcactaggaattggaacgccttgtgcatcatggtattcatgggcaagaagcttataattctcttgatagaaagtattaaacgcagctctgatattcatcacaatttcctcacagttaatctttgtatgcttcagttgaacctttagcaacggtctcaaatcgggaattcagtatctcaaaatagtcttgatacgttccctggagggcttcatagcattcttctactgtagagtaaacacctctgatttggtcagagccaggagcaggataataattagaccaagttaaaagtgcatacattacttacgtttccagctgtagtgagccaaaataagaagcactgcaatggcaagtagtgatgaatgcagtgctgccagcagtgcacctagtcctacacccaaagtaacataatcatacttagttacttcttcacggtttaaatcatagtttttgatgaaccactgcttaatctttttcatgtgctattttatccattatgaaagaaatgatacccattagaaatgcaacacttaacactgatactgtttcaggaagagacataaaggctacacctataatgccaaaacctaacgctcccatgcagatagttgatgcaacatttctaattaattcacaacgtttcattttattctcctcaagttgatagggttatagtatcactactacaacccgttgtaaacaactttgtgaaataaatttctatttcaaatcttctgaccagtcaagttttagcggctcttggtactctctatcaagcactactggtacttgaacttcaccctcgaagtgagctggacctacattgtagctgagagtaatgtgcggtgagtaatctgggaaatcatgagttgctcccaaagctcttgcatattggtgacggaattttaagtattctgaatctagcttaagaactagcgtacgtccgtcttgtgtgtcccatacttcaagtttacctgatgtagcaacttcaaaacttcctgaagcacaaacgtatggaacatgaactcttgaatagcatatcgtcgtatgaatcttatgacgaggcacaggattagggaccttcaactcacgctgaaggtcctcaatagcatcaagagttttctcagagaatttagcagctacatatagaccagtgctaaaatcactgaagttcattaggcatcagcttcttcagtagtttcttctgcgaactgtgcttcgatttttgcaacgaggtcatcaagtttaacctgaccgtcttcgctgatttcaacgccggatacggcaatcagcttctgcagtacttcttcatactgtgcacgcagagcagaaaggccttggatagtttcagacaggtcaaatacacgaactttcagagtatcgacttgggcttgcagttgttcagtagtcatttttgaattcctaatatagtgttgatttttgaataaagttcttctagagaaccgtcgttagttattacgatatcgccttcgcgaatcggaagtccacgctctgtgacgtgagtatcttttttagaaccttcttgctcaggacgaactacatgaataactgtagcacccatcgccctggctacatcaagttcatggtcttgacgagtatctgggacaatgaaataatcataatcaccaaaagtatcagccataaccaaagtgaatcgttttacccaatacatgcgatcgagcttatcacagacaatgtcagtcccaagggtctgcatgagacgacgaattgaccatggctcaacaggtttatttattacaactttacggatgacttccatcgtatcaccgtcaagtattttacgtttgttatcataaaccacgccaggtaaaggcaaatcatgatggacatattcaatggcattcgccataatacgaatcacgtctttagtagacagatttaaatcttgttcgcgatcgtaatcaatgccctcaatcatagaccgagtgatgcgaggaaactcacgagacgtatcacgataccactcaataagcatagcatcagctagtgcatctttaattggacccgctaactgatgctttgttgcattgtagttatccataatgtaatcagcagtagtgtctttgccactgcgttttttaccaatcaaaaataaaagcttcaaattattacctcatagaaggatgcattcccatgaccttttgctgatactgagattcacgagtatcattgacagaaggtctaccagtaattattataccatctttttcaacttcaatgtatttgtactgcaaagttgctacacataccatggcagggtcagattcttcagttaaagaatactcaatttctgacaaatcactcacccacccaccgatgtagcggacagttaatactatatcatgtttatcgttatcaagaacatgcattaaaactgcaccaggaaatccttcaccgtcgttattccatccagacttgtctcggtcaatgtagttttgacaacttaacatccatttgtacatttgtacccatgaatcaagattttcatctactaaaaatctaacaggaacagcgtcaaactcaaaagtagacccaggcaatttagcacgatgcatgccttgaggcgaacctacagtatcagtagcaggaatatgaattccaggaactacagctgtttgaagattagctttaaacgcttgggtgaggcccccgtcagggacctctaatataaagttagttgtgttagtttgattaaacagtccagtagacattatgatttccatacagaagtagcagagtagcgtttgcctttcgacatgaactgctgcagtggtaacatgactacattcgcccaatcagccggttttatctcaattaaagcaccctttatattaccaggaatatatgctttaatcattttgtcagcgccagcaaatcctttaacttggctccagtttatctttaatctagtcttattagatatcactggcgtattagcatactgtttcagaagttcttctaaaaactgctgacgagcctttggcggaatgtagtgaaggtttaacccatacatcaatgtggttgtaccttgctttccaagaccaagataaactatcaaaggaaatttatcccagaatggaagagtgtctttatgtttagcatcatacatgtaagcatatagctttccaggttgaggcttggttacagaatgaccacgtatatttttctttatagtttctgcaaaccatttagcagatttattgtttactgctgcgccttcattacgaattttatctttgatagagcttcgaaatgaatttaccatcacaagagcacgctcctgtttggtcattttgttagcaggttttttctcaatttctgctactttaattgccgttttaattcttgatgcatgacgagccattgctttactgaacgtagcaggatttattcctttgctttcagcgaatgatttagacgtcatgccttttttacgagcagcagagtattcaactcctaatgctacccattgattttcactacgggatttagctttaggcgattctgcagcttcagtgataaattcaaatatagccatcagcctttccatcctaattttttaagtgaatcttcggtaattaacctaaattctatacccattttactggcagtagcttgagctgctttccacttatcaacgtttacagaccatgtgtaaatttcatcaatgtaccgtttcttcgctgatgtcgtcaactttgtgggtttgaccggaggtctagtttctttcttcggtttaacttcaaaaaagaactgctgaccattagaaaacttagcccagaaatccatgaaataccggcgtttctttccatctgcattactaaagtacggaatgactacctcttcgctgttccattgaactacatctggatgattgtcaagccatctcatcatgtactgttcccacgtagaacgataagtaatctttctgaagtcgcctttatatttgtggagattctgcggcatgaatttgccggaatatgccatagtggcctccttataaatactgttattaatatttataagaggataaact

SEQ ID NO: 39 - DNA, 158363 bp, unidentified
  source 1..158363: mol_type = genomic DNA
ttaacgataaagtccttcaacgtcaatggatttgtgttgacggttatattcagtggtgtagtcgtctaacaccagatattcacagcagcgaattttactggacttatagtcatcagtgatcgacacgatgtccttcgggttcagcttacaacgaacaacgcgctgacccaagtggccgaagcattgcttcagatatgccagcgagcagacgtgcagcccataggagcacaggtctttgttgtcatcgttaacgaaggaacgcgccatgcgtacaatcgttcccggagtgttgtcgatcgtaccagagtgcttgtccatgtaattgccacggaccgacttgtacagaatgatgtcaccgtcttcggcaatctcaatatccgagtatgccatgaattcatagatgcggccggactgtaccagggacgaactcgggttctggaacatcttatccaggaagttcgtcaggcgctgcatgttgctgtaatcaccacgcagcatcagtgtcaggatacgcttggcgacgctcgtgccagtgatatcatggccggaccaacgaacacggttattgctgatgtcaaccaggcctgtcgcaaatttcttaatcgcttcgcgcggcttcatcaacgtatacgccagtttgatgtcacgagatttaatcgcttcaacgattcggtcatacgactggtggctggtcgtgatcgtttccggtttgccatctatgacaataacgacgctctccggcaggatcatgatctgatgttcgttcaggaacacactcagctctttatcgccgaattcagccttggtctgtttgtcaccgatttgctgcgtttctttcaattttactttgaaagtcacggatgacagcgccagacgcagggtgcgaccgaggatgctgtcgtaataaccaacccggcggcgggcgtccatggagccgcgcatcggatacgtgtcttcgtcaggtaaaataaccgtgatctcggaagtctcacctttgtaaccatcaaccagagcagatgccacttcggccagcgcaacgattttatcgccgtcatttttagaattaaatttgtcggaagactcagacggtttcagctgatcgcgcgggatcatagccgctttgatcccagcacaactgctgtcgtctgtataacgcaaacacaggaattggccgtggttctccatgaacttgccgacataccactcttcgtcgtctttttcatatacagccacgccgccttccaggacttcgaattctttcgtggcgtccgattctttaatcggtgaaatgacggtgatgttgtttgcttgtttgatgatacggaccatcagcgcacgggcgatagttttggggctgacgccataagccgatgccagggtggtgttgctttccccggcctggctctgagactggatcagttcgatctgttcggttgtcagcgatttcagagaagccgggtcaacacccagctcctggtcggacacacgctgtaccattgagcgaggaacgcccaattcgttagcgatagaattctggcttttgccatccttcaacatccgcaaaatacttttttcggtagcagtcatcttgtagttcccactttgtgatagacggggctattatgccccgagaatacgttttgaaatagcggcgaagaaaccctctttgtcttcttcaatcgggttctgagccacaggcgtatacgtcgccatcagatgttttaacaagttatggcaatcgacacgataccggttatatttcttttgggtctgcgaaatagaacgtgtccagctgatttcgcaataaccgttgtttttcagcaattcattgatgctggagaacaattgaatcatacgcgcctgcccatggcggtattggtcaaagttctttttgatactaacatggaaatttaatttttccatcgcctcgttaagatctttgacgccaggtaatcctttcttgttcttactgatttccttcagataatcccattcagtttccgggattaattcaatattattcttatccagctgggatattttatccttcagataagcaaacttttctgggataccttcgtgagatttggccagaagtgactccgcatacgggatacggtttatgatacaacgagtttgctttcttaatgctaacagttcccgggcattcttagatttgaaatacggcatatggcgtttcaacaacatttcaaataccgcatcaattggcacgaacacttccgggaactttttcatcatcggaaccgatttacggcgggcaaggatgactttcttatggaagttcatgaactcaaatattttgttcccctcatcgtccataggagtgttgtgcatacattccaaaatgctccgggcaacgtattcattaacacgttttccacgaatatcatggatgctgttagttcctgatatctcaatataaacaatttgcttaccagaatcaatgatactggagatatcttcagcagataattctctatccttatagaaactgaaacggaacccttcgtattcaaacatccctggatctttttcgaccgggggcttcacatactgcatatcatgcatgaaataaacttcacttggtacgagaatttccgaaataacttcgtaaaacttatcggcaaataccaaatggtcaatagttgtctcttgtttaccaacccaagattcaaaataggattgaagctcttcgtgattcttgtatgcgcctttatggttttgcaataaattgcgattggtcagtaaagaatcattgggcttaacaacgatgacaacatcatgattatttcgcgccgtcctgattttcagattacgggcgcggctggagttatcgataataatagcaacagattttttctcaccaacccaaccataaacgtcattcagcatgagtgaatccttggattcaatatacccggcatcccaatatatttcaaggtaataaggattcccggcagtacggaatggagcgtcaacatcgatgttacgttctatatcaggggtgccgttgtaaacatatttccctttgtagaagcgggtatcagccgggaagtcccgctccatcattttgcggaaaccgctaccgaacatgttggtgaattcgtctttcttcatatacaacgccagcgggcctttgctggccgccaggttgagttcggaaatcttttcctgcataattttattcgccactttcttgaactggcgattcagggtttcgcgagtgtactcatcgtaagacaagtcttcacgggatggtgggacattaagctcaccgagttcaaagaaggtataggatgtcgggaacttttccagaatagaagaaacgtcttgttccagttgttccagatcaatagggtatgacaccccgcccatgacagcatagtgggtattccccgtccccttcggctggatataggtattccccacccggttgttaaaactgatgtcttcccaatcgaagttgtatgagtgattcgtgactttcgggcgctcgttgggcttcataactttgccaaggcgaatcagctcttcttcaaacgcacggaagcgactgttcttgaccgggactttcacagacaaaccattccattcatctgtgtcttccggcgcaggttcgcgggtttctacgtttttagtcaccaggtcaacggtcgggatacggttcccgttcagatacatcaggaagcgatagatcttcccttcatagcgggattcaacagtgaatgaatccgacacagagaaaggtgatttggaacccagaccgaacgcgccgatctggccatcatcgtcttctttggtactgttgaacaaagtggtataaagcccaggggaacggatgatttcaccatcttgggttttaaagaccaattggccaccataatacgaagagaaatcgggtacacccaggacttcagaaccttctgggatttcgtcttctttgacgaccatgttgcccgacagaagcacttcatcttcacgggccaaaataggttcacccatgatctgttccagcgaaaggccgataccccagtctttgatttccagccatggctcgtaatcgtccgggagatggacttctacgggaatgttagaaggcgccagatacttactgtacagttggggcatcggggacagagaggcataatgagacggcatccagcgctgtaaacggttacgcatgttgtgagcgtcaatcgcattacaaacggtctcacgaagcgccgccgcttctttataacgataaaggctggagaacaacgtttcaaataacttatcggtcattttgacgttgaacacattaccagatatagatgatgaagagcggacaaagtgctctgacttgcgcattttcataacgaagaagtcctatcagtttcaaagggattacacagaggtatgatacgtgaaggtcgttcaattgaaaaagcccctgagaaggggctttagttcatattatccaatgagtgatgctcggaagtcaaaggtcgggcgcgtcgcccccggttccagcacttcttccagataaccgacgtattgtttgacaactacagtcggctcggcacgattgggcttggttgcactcagatccagaaggctggaagtcacctcctctacaacagtgcgcttgatctcaaaatggtagcggctcccgaaggcggcaatctcgacttcattaattttgaagtcagacaattcactgctgttcaacgtaccgatattcaattgtgagcgcagatgctcaacaatgttagaataaatgtactgcggcgtgatcagctgttcaatagaactcataatatatcctctaaatttcgggttcaggtttacttaatcgagcgagttcggctctaagatacagaatttcgtcggccatctgtttcccttcaccaaacatgacatgacacttcaccttcctcggctccccttcagatatttcgaggagccgttcttctgttaaggtgtcatcactcatttgcgtttccttttgttctttccatgcgttttggctttcttcggtcgtttcaccgatggtcgaccatggcctggcgttcccggccctgaattgttggaataccaaatatcatcaccgcgatgacgtgattcctgataactacgcgccaacgcttgttctgcactgataacagcaccagccatagcaatggcaactaatgcctttttggaacccattataattctcctttggcggcataggacaatgccttgacgatcatcacagccaactgcatagaaccatagtcaaaatcacgttccaccaatgctctgatttcatcacgagattggacttctgggcgatttttgctctgacgacgttcttcctgatcgattagatcgcgcagcatcagatcagtaaaagaatattcgtcaaagttttccagatattcctggatacccgatttcggtggattggtttgtttgacttctggtattttagactcagacgttttcatggaacttctgagtttatagatcgtggtgctggcaacttctcgccctttgttcaaggcagtgaagtcgacattttgaccccaagcgttcttcaccggatttgaacaacattgaccgaacaaatcagaacaaccatcatccagtgccaggagcgattgtaccaacgcctcataagttggttcatcagattggctcatttcattacattgggcaacgatgttatctactgcccaaagtggttttaacaattccaataatatttcggattgttcttgggacaatgttacgcgattcttcagggatataatgaacttgtcgtacgcctttacagtatcaacaagctgctggtaagtcggtttggtctgcgagttcattcttttattacctttttgtgaatagtttgactcaatattatttgttcacatctacaaatcgatattctgtagagccgtatttggttacagatcttttaaattcaagttatgttattataccaagtaaacgatggcggagtctgattattacttgaaaatttttgtttttctaaaaaattctgtaaacggttgtctaacacgcattctacttgtaagtcaacattttctaaagaacacgtatactttaaacgttcaatgagacatgtaaagaaacccatgcattgaaattgttctaacacactgacattagatataacaaatcttggttttgtattgtcaattttaccattgacaatactccagttattccaacgaatgtaaatgctcaagaaatttagacaatctatataatagctaacattctgaatttttctgatttcacacatttctttcgatatttttacattggaacagattaatccaatatctttttcaaacatgtgtatcattttcatcatagatacctaaaagaaaagggatagagcaataataccctatccctgtttattgaagaattaagtctattcagcttgcgtgtagttcaaatcgccccgcagatcctgaacaggctgaccgccaactgccatgatatagatggtgttgatggtttcgaaccaggtcagttcgttaacgtctttggtgtacggcgtcaccggaatagaagttttgacttcgttcgtttcagtcagcgggtgtgctccaaccagagtaaggaatgcacagcgcccggtcggatgaataaccccttctttgaacaacacgatctttttgcgaggataggatgcttcccccaggcatacggcaagatggtggatcatctcaggccgggttaatagggtatcatccctgatgataccttgtttaacagctgagataacgatctcatccaggatcgcctgttgttggtgaagactcatagattcggtaagttttacgcccatgatatcaccctttgaagttaatcggagcctgaacaccagattcaaaagctgcctgggtacggctatcacttacaacctggcaggtcttttccagatccaggcgcgggaaaccaaacactccggccacgatattgcccgggaactgctggagccgggtctcatacagctggcacgcatcgagttttttggtctggctgatacggaattcatcacggcccgcgctgattacgatctggatttctttgtacagggacgaatcaaactggatgttctgttcctggatccattgcatcaccgctttggaaccgtcggcgccatagcggccttcaaatgttcccttgatgacttccttcaacccgttcttgtacatgtccgggatttgcgccgtttcctgcactttcagagtataagaactcagatagttctccgagtccttgttgaacttcttaacattgttctccagcgtgttgaagctgttgaacgtgctgataagaaacccggcgatgattgcgatcaaaccaacggtagcaccgacgacgataagagaagaactgatactttttgacatttgtgtagcctcttgtttagaatgggaaacgacgatttagactaaaattatatggcccagcgccaagatagaataatacaccgaacggcacacaaccgagtaaagacacgatcagggcttcccaggtcttcaactcacgccatttcagataatccatctccttcatagacacccggttgtagcccttgctgatattggtagcgacttcttggaagactgctattcccatgggctgtccagtaagggataatccattgcgggaatgcaactccatgttgttcataccatctgcaaaagatgtgctcttgccccaatttatcttcatatccttggtgatatcggtaacgacgatgacgtcattcttcttgccgcccgcccatgcatacaccagcccctggaaatattcaatcggctggcctgaagttatcacccaaacgatgttcacctgacgctcggcacccagagttttcagaacaccgttcaaataatcattccagtaaccgacaggaagattcaaaccggacatgttcaaaacccggttgacacgataataatcatagacctttgggtacgccggaatataatctttgaacttctgggcaaattgttcatccgaacgggagaataatgaatccctgtttccaagaacgtagttctgatacagatgatcttgtgcagctggctccccgatcttcacctgtgcccagcgcggcggctggcgcaaaccttgtcggtctatacgcttaatggtcagatcaccgacggtcgtgtgaacatcccagtcgacgtcgtaatcatgctcgtcacaatagatcgggacacaggactggttgcctttactatccgttgaacatgtctgaccacattgatactggtgctcacacgagaccttttcccgagtcttacccgtaacataaccattaaggatttccacgtcagcagcactccccaaggagaatgctgcgtatgcacccgcttgtatcaggcaagacaaaccaaccccgataagggtcgtatagaccgtctccttaacgttgtggtcggcctggtgtctgacaatgaacgcgacggccatcgccaatggcaggatgaaaaagagatagatcataatacaccacccacgagttgggccttcgtcatacccaacagttgttctttgtgtttttcatccgcgccgttggcaaccaagagcgcccaacgttcttcatggtacttcgggtccatggcttcatcaaacgataggtgatggcgaaacatgatggttgccactgaatggagaacgtgcgccgtagcccgctgtaacgttcttgggcacgtgatgagatctgtgtgagtcataattttgatccttagcgataaaaagggaacgggccaaatataagcccattcccattattgaagaaactagtattgctcagttatttcttcatcaatgacatcagattaacgctctttccaacaggaacggcctcctgtttgcgttcaatacgctcttcaggttcccaacgtgttcccttctgtagatgccagatgtggagtggaacgcccgtctcaaagaacaccggcatcttccacttctggacgcctgggacgtgccctgcgggagccttctcacataacagggtatccggtagccaaagtgaacgcgcttcccagagtgccgcgcaggagtactccggccaaatgcgttccatgtagtcgatttcatcccaggtacgctcagcatcccacccgatataacgagtgttcttcagacggaagaatttcttcaaccaacacgcgccagaggtctcaaagttcagacggttgatgaacgtcagatgaccgaattcttcaacgcattcatggaatgccttttccaaatcggcttccaggatgtcgcactcttcatcggtaataggacagccgtcgatctttttcttcccgtgtttggtcacccaatcatcacggttagaaagaaacgccgcgccattgcgattcgattcactgccttcacggtcacgcagcatgaaaccgggaacgtcaatttcccacatgttaccgaacaccatgttcagggcttccaggaagttccaggcgctcagacggccgaagtatttccaggacatcgccgtgtcccacaactcagtaaactggtcttccttcatggtgcattccagcatccaacggaaagaatccatctgagttttaccgcccagccaatccacataggactgaacacatgggatcatcttcgacttgcggtagcgacaatcagtatcgaagcgcatgcgctcaaagttcaggttgtaccaatcacagaagcgctgcatctcttctttagtctgaggcggcaccggaaactcagagtagattgtccacgggccgatcgcattatagcagcaaccccaaaggaacgccatccagatcttgcgctcgatcttttccaggttggtgaggccttctgtgacttcaatagcataatccatcagacgcatctgctggttgtgctcttcagtataggacagcgcttctacccaagccttgagcagatacatccggttctcaggcttgcggtagtcaaccttcagatcaatcgggtacttccattgctcaggggctttatacccctgtggcattttagataaatgtgccatacatcaatccttttcgccgacggaacttgaaagttcttcatctccaggatgaggctgaactggctccagttgcacctgctcggcggtgaccgggccgaatgcagagttccagatatcgacaaagcgtttgtcagaagtaacaacccacatgcgcttggctttattggaacggtcagcaatgaacgcctgggcattggcgttagtacggacgagaccgacctggcgccactgaccgaaatctttagacgccgggttagtgttcagctgaaactgtgggattacccggttgtcttccgggtaataacggacagcattgatcatcttggcatcgcccttataatcaatagcgatagccacggcatcgcggggaatcaaaattttcatttcatttcctttaaaaataatttatagacaacaggtataaagaacgataagaagccgaaccagtaaaccacattcatggttttcttttctgcttctgacagatcaatgaaaccataatgatacactatcatggttaataatgaggctaaacaagtgatcgccccgaccaataaaattgcatccaaccacttgttgttcatcttcatttcctcaacatcatagccagcacgttagaacttttggacagctgtttcttttcatcagccgtcttcttgacaacctggcggtgggtagccttttccggtacgcgatgcgccagcgggtctgaaccaccaacttcacgggtcattggatggtcttcgcaatacttatagaattctttgaagacgaacccagcgtcacggacttcattgatgatcatgtgatgaatggcattgccaatgacccacagcggtgcgtcgaatggcaattgggcaacttcgctgccaacgccgttctttttgtagaggacgtcctggccgctgtatgaatctacaacaacttcccaacccgccgccaccatttcagatttagacttttcgaactctttctgataagactcattccgagtccagcccgaatccccagcttctttaccagaacgcccacggatacgagcatcatactgataacgatccggatacgtgaagtacaacagcgccagttgctcaataggataattggcaaacatccattctggacgccatttatcagacagcatcagcggttcaccctcacagaccagcgtatatcccgcgctgagatgttctttgaccagttcgcgggcgatatcaccagaacctgtcgcggcatggatagcgtccatcgaggtccacgaggcaagaccggatttgtttgacgcagtatactggccgacaaacattaatttcagttcatcaaaggccagaccaaacaggcgcgttttatcgccgatggtataagtgacctcgcgcggctcaaggcgagtacgcagccattctatgaactgtacgacacgagtacccttgcccgtgccgcttgtgcctttgattacaatcagttttgacattatttgtcatcctcaatacgccagctcacgccaccaatccacggtgcccaaaagacagccacctgcggaataccgttttcttcaaactttactttatactggtcgtcaaagttatagaatatttcttcgtcatcaggagacatcccaatctcactcaagacacgcttcagttctttagccgctccaacagaggaaggattctcttgagaacggatgtagttgttgatatgaatgatgacgccatccatatcactatcaccggaacgtttgtcagggcattctaccactttcagcaattcgttagacacttcagactccttgacggacaaattgataatgtgcaaccaggcggtcaacgacttctgtaaaattctcacgcagatagtcgaagtggttgcggccttctactggtttaacatatatcatgttttctgaatccgaaagatccagtttttcataattcccctgaggaacgaagatgctgaaaacattgttccagatgcacgggtcgacatatttcggattgtcgtcaatcaaaacatcgccagcaaccatgtgcttttcatccgtgctgataaacccatcaaagatgttcgggaacttgccatacacgaactgacgtttgctgcgttcgtgctcaggttcacatttggtgacagcaacaaattccaccatttcaaacttcatgagcagcgcatcatgcaagttgttcaagaactctaccgcaccgggcaacggctgcatacgggagtacagatcaggttggcgccaaaagtccatcgggtcgcgtccgtttgacatataatgggtcttaccgccgatactgacatatgaatgagaccatgccggatgagcacgttcacgcatcaggattgccaaatcacccgcatgattcatataacattgcttggtgatcggctggaatttagcggggccgacaatcccatccgggagacttgcttgggcttccaggtttccgtcattaaaccatttgacccaaggcgatagactatcgaccattgtcagatcaacgtccaccaaaacccggtacaggcctccgacctttgagttcatatcgtataggcaagtcaggttgttcatttatcttcctccactttatcatatcctgtcgctttacaaccatcagcctggcagtcgccatacaggacaaccatggagtcttttacgaaagtggaacaatgatacagctccgttgttggatcgctgtcatcgtaattgcaaacggtctggatcgggccgggagtagtaccctggagggcggcatgtgctttaaccatgtcatccattttggtctgagcctggtcttgagtgaagtccggcccgctcaggtcaggaacatccagaagagtagaacacgccgtggtagagaatgccagagcgcataccagaaggatcttattgagtttcatcttaatcacctattctttgtcaaagggaaacaacaaggggaattatatccccctgtcggttattgaatcaacctttcttacccatcatcgccaatagatttactcgacgtttgtgagaccagccaacgaccgtcagtatagactggatcggttcgatgaatgacttctcaaatgccgtgttgtagtccacccattttgccatatccaattcttcggggaagaactctggataggcgaaatagttctggccgaacggattaccggctttcagcagaacaatgttgactttatcaccagattcaatcaacggtaaatcgagttcttcatgcttctctaccaggcggttgtagccgacgcatgccttcgcagcaaagtgcgccccagagataaaggatccgtcaggagccacgcacttctcgatgtcagatacgcccgatgccttcgcaatatcatcgacgctcagtttcatgtactcatctttatacgtcttgatgaggtcttggacttcgctttccgtgcctaaaagaatgcgctcatagcacttgatgagacgttcacgacaccattctggtgttgttgatttacgcgcctcaagacctttgaatttgatcttcggcttctcatatttgatgccttcactgtcatagacagccatgcaatacatcttcttggcacgccatactgcagcagacgcaatgacttcacgctcccaaaccatgcgttgctcatagccattcatcgtattacacagcatctgtgcccattcattggtcttgggctggtaattctccttgatccattggtcgatgttatcaacgagtttgtggtggtcagtttctccttcccacaatttcttgaccaggcgctcaatacagatatagttcgagtccgtgtcccccgcgataacataatccaggccgctggtcccacacaatccgttaagataatcgtcagtgtaacgcttgttccacttattgatcaactgccctgaagttgtaatcgcttccgcaatgttgaggttaaagtattctttaaaccacacgttagagattgcaccataacctgcgttcatcaagatcttcagaccttgctgtaacgtgtcttgggcaacgccaaggtcttcccatttgtgcatcacttcggacaggtggtcaaggtcgatgtttttgtgctcttcataccagtcttggtcaaagtagcgggatttcatcgcggattcaaggtggaagtcacccttagacatttccttacaccagcccgcccattgctcatacttcagacccttggccttctcacctttacggtcagcgtaaatgccgcgcatgatctcagagaggaaggacattttctcattactgaagaactgaacgttcggtgtaaacgacacgttgtaacgcacgagggtttcaaaccggaattcacccaaggcaaccagttcatctacaacctgtagacgttcatcaatcgcgcggagcagcttgtcatgaagattcttcatatggcgacgtttatgcatcggcgtcgtcatatcgttcatcttagcagcaagctcttcacacatggcttcaatgatttcacgacgggtgtgtttatcgccgataatcgtttcaggcccaaggttgtactgctgaatgatgtgtgggtacagggagttcaagtcctctgagaagacccaataatagatccctggcgccacttccatgacatatgcgccttcaaagtttgtcggcccatcatagacgcgctgaactttgggaacaatccccttttcgtacagcttgtaataacacatggccaaccaaggcgctaccgtacccaagccgtcttcaaagttagatttggtgcgatacgccagaacaaacatcagctgaatgagacgcagcttttgttccagacgccagacgagtttgacgtccttaataccataccgggtgtgcttacaataatcgttgaaatacagatcaaacagtgatttgctctcactgtaatccatcttcttctcaccgagttcgcaatacgcaatccagtccaaagaatatctctcacgtgtggtgtacgtgtgcttcttgtagacctgcaggtaatccaacataggacagccaacgaactgataagtcgtgatgtcgcccttcttatcccggatgatacgctttttgatcttaccccaaggactcaggcgattggtgtcggcttcacccaatacttgcatgcagcgttccaccaggtaggggctatcaaattgctcgatgttccagcctgtccagcagtcaaaggcccgcgcttcccagtaatcaacaaatgaccgcagcagatcttgttcggtggtgaactcttgatattctacttccagaccaccgatctcttcatcatttggatcatatttgaatttatggcgatccttagaacacggcatcccccagaccatatatttgttattggtcagatcctggagctgaatgagcgtaattgggaatgccgcattcatattctgagtaatcttaccattggcgtcaatgatggggaactggtcggtcacgttgttggagataaaggagccggggaaatgctcgcggacgaatgcatggttggccaggatacgtttatggaactgacgaacacgcgccgcgctccctttgaacgtctgtagttctatcgtcgggtgtgggaatggacctttagtcatctgcccatcgacccaccctgcagagaacacttcgatatcaaggttggcgatatgaatgttgttgtaatctggctgaattgtaccaggaaaactgtgggcgatgaattgataggcatagtcggtctgaccatatatctccgcgccttctacatccttgtattcctccatatagttgtcggcgtcacgcatagacgcaaactttttagaaatcagaggttcgttcaacaggccgactttttcaacattagaataatcagccgtgggtaaatatagagtgggttcgaatttctttttgagcatgcggcggttgcccatgtcatctgcaattcgaactaacaggtcgttgccttgccgggcgacgttagtatagaaaacagtcattgtattctccaggttatccgtgccgttagcacgttcccataatttaaccgaggagggttcattgaccaaggagtttatatggcaatccccttggtaagcatgattcctggtgctttgaaacagctctggaatctgggaactgatttgattcaatataagcgggaaattgtaagcgccaaacacgatgtcaagttagaagcgatcaaatcgtcttccgactgggaactatctaagatcacagaagttggtggttcttggaaggatgagttctggactatcgttcttgcggttcccgcgatcctcgttatgttagctcctgttgtggaactgcttttgttccccggcgaatatcataaaggggatttcatcaaagcagtagtcggtggcatgcaagccctagataccgcgcctgattggtatactgcttcattattgacagcaattagtgcatcattcggtatcaaaggctacaaccactttaaaagcaacagccgcaaggcgcaagctgtcgatgcccttaaacaattcggcgtcaaagtggttagcaaagatcccactgttgttactcagtcgggttctcccgatcttgagtctgctcccccagctgggtctactgcgacctctggtgcgtggcctgatctgaagaaataatgttcaaggggcttcggcccctttcttttggtgttaaggaatggatgtggtaaacaagagattgctcgtcacccagggcggggcgacgatagtaagaggccggatttatgaacaaactaaactcggctcacacaaaactagactgaaagtaaaagcaccagatggtggttggccaacaaatgtgatcgttcccgatggtctcatagaacgagggttcgcgacatatcgaggggcggagttcaaaatttattaaaaatttattgaaaaactttacttcttcaataactggcgtatacttcaaattgtagtacgaacaaacaacaaattgaagagaaggaaatacatcatgggcatcgaaatcatcgttcaatcaaaatcaggcaaaacagtaatgtacggcactgaagaaggtcgctgcatcattaactacggcaccatcactggtgaagcgccagagaaaggtggtcgctatttggttgagtatggttcgcgtgtcctgatggtgagcaaagtcgacggtcgtgaaattatgattccacgcaaagaatactttgattctcgggttgaagccatgcagttctttctgttccagcagcgccatgagcgttttgtggaagccaaagacgctgggctggacgatgcaactgccgaactgattgccgaaggaaaaatgactattgaagccgctctgggcgatatggatatggacgccgaagcacattggattgaatattccgcatatcagaacgaatgcgaagacgatccggaagatgacgggtttgatccagatctccacggcggcgaagacgacaatacccctcctctggaaattctgatggcaggtggtcaggccgcttgggaatggcagaacgagaaaaatgcctggctggatagccgcttctaataccagtaaagccccttcgggggcttcttctacaaatttgaaacataggtctacacaaagaaggggctttcgccccttttcttattcgtcccagaaatcatcgtcatcatcgacgtcagccaattcagtatccagatcttcatccgaatactccggcagtttaccattctgttgcagataggcaatctcatcatcttccagctgcaggtcggtggcgatataaagcgcgtcgctttcttcatcatgctcaatgctgtacgacgtatattccatgccctgaacggtaatgatgatgctggtcggatcatcggggtcaacgtgcgcctcgaaaggaactccatcaatcggagcgtcttccaggaaagttgccagggcgatagcagcacgaacaacgtcggtgccttctacggacgcatagatctcttcggcgccagtttccccgcgctcaaaaaattctatggttgtgccgtcttgaacgccagtccagattggagcgtccagtattgactcagattcgaataaagtggagattgccatgtcagtgatcctcagtgtggatttatggggtatttagccacactgagaaccatatggacaagacaaattaggaaggtataaatgtatcgacaaaaatgtgatcgctgccaggaatatcacccaactccggacatgctgccttcatcggttctacatacggcttactaccaacgatccagaacagagagttctcgttcaacaactctggtttgtgttcctggatccacgtcatgaccttgccttcatagcgaggatgaagttcaatgtcaccccattggtattccatcagatcgttgtaacgaacccaattggtggtgtgtaaatcccagtgatggacattaaagcgcggagaaccatccgctctctccagttctttcgggtcgtaacgacctaacaggccaagcagtgaaacgctcttaggggactgcggagcgtccttcttaccatacagataatccgggttgtcatgataatgacgagtgaagtccacgatgtgtggtaaattggcatattcaccaataatgcgcagacgactttcaatgaagtcaaggcgattaggaccgatgccgatcaagtacacatttttcagattcggtttcgggtgcattgccaggcccgtcaggatactggtgcaagagttgcatgaacccgccgggatgatcagatcagtaatatgatccggaatgttggcgacctgttcaccacccagcatatggaatccagcgatgcgctccggggaatgcaatttatggtccagagtgatcccatactccagataatacgcctttggattctgttgttcaatcagcttcttacagcgcggctgtatagtgctgttataaccagaaccgacgaaattgaagatactaccaaaccaggcagacattgccaccatgtcgtggttcatacaagtggttggcttggtagcacccaggactgtagtcgtatgcccgccgaagtgccgagagactgccgtcgccataggggactgcggactaccaacgacagtaccatggatgatatcgggggaacctccggcctttaaatgctcaaccatgagccagatagcctgacggagtttgctgccgttgatgccctgtttaccattggcgtactgggacagtggcgcgaagtaatcttcacgtttaaaccagacctgttggttggtttcggggttggaaacaagttcacacggggtgtgtttgtaaaggtagtcttcccagtggacctggtcacgactgagtgaaagagtgttgaatatcgttttttggttgactaaatcaatccagtggtttacgaaatcgttgacaccagatgaagtctcttcacattttatttgtgcatcgttcattctatttctcctgtagacattggcatatcatagcgtatctacaggagtatagaaaaggagaatctcggttactttctgaagatatccaggaacttcaggatctcagacaaaaagccaccccgcttacgtccggatgaaatctttttagattcgggggctggttgctgtgtgtaagactcagttaccgtctgcacttcagggaaagtcggtttcactgggacttcgcgactacgcaccatggtttcatagtcacgggcgatctcaatatatttccggcgctcagtgaagaaatcgactgccttcactttacggcggcgggcatgagaactctcttcgccatagtagtcgtaattgttacgaaccatccagttcacagcttgttcaaacgtgttgaacaccagcatgggaatgccgtcgcctttctcaatacaatccagtgaagagtacccgacgatgacggtcatacctttctgaaacaacttacaggggatggcgttacccggagtgttgcggttgcgcgggacgatatgatcttcacggtgaacaaagttcggatacaagaactcattgagagttcccttgtagcccttgtatgtgtacatacggacgaatgggggaacgtcaacgaccacgtcgttcaattcccagatagtaacattgcgcatcaatatttcctcagttcatggttggccactgaattataacgcgattcggttatagattaacctatttgagaatcagaattatagacaaaaagaagcccggtatccttaccgggctttgataaagaccaaaatcacatggcctattcgcagttatgctacacagattattgggagagtgcgccgggaatcgaacccagagtcatcagaacttagaaagctatgtgcatttcacttacggttctgtgattttattcttcctcaactccagattaagaaacaggggcatgcacaccttactgttcccgcaggaagtcgcacccataatttggaaggagcaccaggattcgaacctgagatcatgggatcaaagcccattgccttaccgcttggctatgctcctgtaatttggtgaagagttgcctgcgtcaccaggctggctgttctgtccatttaaggcttgcagcaggaacaacacggcttctcaccgttgatcccccaaagacttgagcactcttcataatttggtgggggagggtagattcgaactaccgaagccgaaacacctgatttacagtcaggcccatttgaccactctggtactcccccgaatttggacgggcttctcacccgattgtgcatttgatctgccgtagcccaactccccgcgtcgtaacgccgattggttaaccggcaaccagtgccttctggttcgatctcctggaactttacaggcttcgcgccaaaccatttctggtagttggggcatcgtttccgatgtggagtcaccccatttttacacagctggctgcaacgcttactgtgtttgtatcagagtgtccggtgtagcattccgtgaggtgcgcactactgtagcctctacactctgaatttgtatgaagtgggaatcactctcctgggtgtctgtatcctgcaaccttacattggcagctatcgcgcgattcgcacttccgaaggcgcttcgaaacactccacttcaatttggtccggaacccggttctgggccacgcttgaggacatcggccatccttcctcagctaatcaaccgggttccagatttggtgggtgttactttcgtcggtttcagattccgttcggctattggacgttgttccaaagaacttgtcggtcgcgtacttcgtgcttactcgctttcgtttcacacccattgtctggcgatggtggcaggacttgaacctgcgacatatggattaacagtccaccgttctaccgactgaactacaccatcatcaatttggcggaagatacaggattcgaacctgtgcaacctttcggttgtacaccttagcagggtgctgcaataccgctctgccaatcttcctatttattcgcttctatggctcgaagttgcttctcagcgtcttctttggagtcatgtgttcccaaaacctttgttttggtatgatccaacacaacccaatggtcaccacgcttttcaacaaactcaacaatttctttgttgtcggtcgcaagaccatcccattcagttaagaaatcaccgaacgttttcatcatactcaccaatcgtttattgaacaactggtttatttaggtgctcccaaggcggtattttaatcccgcgatcccatctcgcctgccgtagaccagagcttgttggcagtccaacaaatttggcggggtctgaggcttttcacctcacctgctggattggcctccagccgttctatctcgggactcgccgtccggacagctatcccttaaactatcgccccttaatatggtgatcctgattggttttgaaccaatgaccaatcgattatgagtcgactgctctaaccactgagctacaggaccaaaatcttttaattcatattgtcgtggacaataccaagacagagggttggaatctcttgtcctatagcgacccataaaccgtttgatcagtccggcctaaaggattacccacgacaatatgaactgtttactctttggtctgggggaggatttacctcccccattcctcccggtttgggcagcgatctctcactcaaccagggcgccggcaaattttagatcaattctacaggtttgtaaccgcgctgtcgccaagtcatgttgcttctcctatcattatttgaccgcacttatggcgggccgggttgtaatagttgagttgtgatcaaccaagggctgctagaccttttatcccgtttgcgcatgatcagttcatgcgagtcttatcaagcaccttacggcaactcttctggatgtcatcgccctgctgccaggctcatcccaggagtttatttttccagggctttccacttacaagtcttaaccagaccgggatacgggcttgtaagatcgggttggacacaactttgaggacactgacgacgtctactagtcacccataactgatattcggatgccagtatcctcaaagttgcaaccaatgtcgcaactcgcacctgagtgaaagtcaggcacttgtctattcgctagaccaagctgtttggtgtcgggtgcctcccgatgaccttaacacggaaaataaggccgggtgtgatgaaaccatcagactcaaggagatgagactattccgttccctcttgcgcttagcagaattcaccaaacatagcagcatctatacagaagcaacttgtcctctaacgctcggaccaaacgaggctggctggttgattcagagccgctggttgctccagcaagcatgggttgatagcccggcaacatagaatcacccaaagatgaagaacactcagtggtacaagccagggataccaattttcaggtcctttgcgagttctttaatgctcttcattttgtgaacttgagaatactacgcctgtctcgggtttccccttagttcggcctcccagtcatcgccgcgccgggtagctaaccctgatggctcgtctgctactgagttcttcttggtgcccaccagtgtccggaatgtgtaggcatcgcaatctgcaaggcgtggtctttttcacccaacgctctctcaagttcacaaatcgaagtgccctgactcaacagttgtggcccaacatattgttatcatctaccgggctggccgtccactttgtagatcaacctttgggtttaagataaattgtcaaggcacttcgatttgtgtggatgtcatgcaagaccgggtgtctgccagatcaccagacattgtgttcagttttgaacagaggctgtagggttatgaaccgcaacatgtcttcaaaccttgcacaatgaaatgtcatctcagtcctgaatcacgttcacggtggtgagccactacaagtgagaaccgatttgcatttaccttgcattccatctttgagggcattcagtatacaacaggctccgatattgactagcgctattccggcgtcggatttaagttgcctttcccctgaagttccatgcagtttcgcgtctgacgcggaatgccctcaaagatggagccgttttagtcggcgggagcttattaatcacaccctcccgcctattgttagtgcgccgaattcattgacaaggagtcggaagaccttgctggtgtatggctgttaagctactgccaggaacgtattatcgtttgcatttatctttgtggtcagtttctaaaaacccgcaaagccgcacacaacgagaacgaaaacctgtttgagcacaagacaccatgtcctgggttcacatcgaagtgtttgtctaatgcccaaacagcttttctctcagtgggttaactatactttgttaacccttattgacaaaactttttatttgccggaacttacgcatccggcctcgtcctgttggcgctcctagaatccgggaagacagtaggaacaattatgttaccaacaggaaacctttgtgttgccctttgacgcaacattatgaaccctctttagaagactcataatgttgtcggtgtgatgaggattaccagccctcgaccttcccatcgtgcggtgtcgactcgccgccgggatgctctcgtctccgctttgcgggtacttttctgagctaatcacactttcaacagggagtttcgttctccgacggtcagtgcgtccactaacaccagcagggttactgcgctgcctctattcacacaagcccctgagactaggggttaactggtttcgggttcaagcctactcccactgtgctgtttcccttgaaattttatgatactgcaacacggctaatttgaaaagtcctctcctcttgagcaacaggacctgaaatcctgcggcgaacctctgctcaaaacccggtgcgctatcgaaggcgctttaccagagtaaacatcgggtgttcctaggagagtgaaggccatcccgatgatgaggataaggagtaacgctatgattgtcatactgttccctcccttccatgcaacttactttactgtaattctgtattgaataaagcgttattttaccacagaaaacttcacaaccttctctaggataaacacatattcctgagcagctgcattcgacatataatgcgtagacggaatagaatgtgaattcgttgtttcgcccagattaacgcggtcacaccagccattgatggcattaccgtagaagccgatgatcgcaacgaagtagatgcgctggctttctggttccagaacatagttgatcgtgaacgcagtgtccgtgcggacggcttccagtttgatcccaatacgacattctggcatgttgggacgaacatataaatgacggaagcggtcgcggcgggcggtggaagattgttccagttcgttgcggaactcactcgtgacgtcgatgttaaatgaaaaggtgttgtgtttcatatcggaacgagcaagggaaaccgcattgtcgataacgcgacggaaatttacccctttatttgtcaggagtttaacttcctcagcaattgtcgtcaaagaaattttggtggcttgttgtccttcatatttttctaataaaggaatgatgtgtttcataactgcggtgttaatgtgcataataagatcctcttgtagaattgaaataaacaccatcattataatagaacgaatgttattgaatattggtctctaaattacaggagtgttttattaataggcagaaactacttttctaacacatctctagactgtatgctaacgctgtgcccttcgagttgtgagtgtcaacgaacaacgagaagcagcctccctggctgtggaagggtgccagcccgcacagggcggtcttacgagcgaagcgagttgattaatatatttgataataacgcgcgcgagaacaaattcctttctctgtcttcaacagctaaatatctccaacaccatattcaaacttgtgtgacggagatcaacatggctacacaaacagttccttcactcgacgtcagggctttcgaatacattatcaagcagcgtatgaaagctgatccgaccttcaaggattatgactttgaaggatctggtctcagtgctatcatccgtctgcttgcctctgacgcgaatgctatcggctttatgcaaaacatgctgaacggagaaagtcacctccaatcagcccaacaacgttctaatgttggtttgtcatctgcattcttgtcgtacactcctgagaactatcaggcggcgtacatgtatgcaaatgtcaaagtcaccccctacgatgcgaccacagcaccaagcgaaatcatcatggatcgcaaggttatgtttgttggggccaaagatgggaagtcttacaacttcaccgttgaaaaacctgtgtccacaaccctgcgaccagaaggatattatctttttgagaatgtaaaactcattcagggtgattggctttacaaaacgtatgatgtcgaaggtagcgcgatcagtacatacaagatcccatctactaatgtagatatcaaccatctggttgtcaacgtgcaggaatctgagacttctgatgtttcttacacgtttgatcgttacaacagtccgtttgatctgaatcaatacgctcgtctttatttcgtagaattgggccttgatggcttctacacttttgaattcggggatggttatatttgtcgtcgtgttgaagatgggaacgtcgttttcttacagtatctggagacttccggcgcggatggcaacgatatcacttcagtttcatctgcgactgcgattgctgggaacaacctggtggatatcgaactcgtgtcggaaagaagtgcgggcggtactgatccagagtccatagaggataccaagcgtcttgcccctctgagctatcaggcggacggcgcagcagtagccgaaacagactatgcctacctgacagagaaactcttctcgaacgttctacgggctaaaggctatggtggagatacgctcaatccaccggaccctggttatgtttacatcgctgtaatcccaactgtgggtgaaacactttccgatgctgagaaagccgatatcgtgtctactcttgacaaatacaatgtcggttctataactccaaaggtcgtggacgccgaagtcacgtatatccaggtcaatgccacgatattctgggacccgacggcaacagcgtatgctgaagacgggttgaaaactctcgtcaagaaaggtgttgtcacctggggaaccaataatcttgacaattttgatgagctgtttgacaaagaagttttgcaaaacgccataacagatatggagcgttccatcgtttccaatattacttctgtcgcgtacaagcgccacttcaaaccagaatatggcgttcttgacagctttacgtttgatttcggtcgttccatcaaatctggctcggttgttatcaacgggttcaagccgcttccagctgaagttgacttcacttattacatccgggatgtaaatggtgttctcaatatgtacaaggtcagcacttctgatacgacgaaggaatatctggtgcaggctgttggtgtcgttgattacgcaaatggcgtcgttgaacttcagcagatcacagtttcaaactatgatgaaggcggcgcggctattgttgtatccccggaagggttgaatcagaacatccaggttgcgtccaatcaggttcttcgtattggtgatgtgaccgtagacgcggaggtccgctatgtccaaagatcttaataacggacatctgggcgtcaagtatgagacgccgttgttctaccagaacgatttccctctattcattgagttcatggatacgttcttcaattggctgtatcgccaaaatggtttcactgaagaagaaatccttgcttacctggcagacaccagttggctgaatccggctagtgacgccagtccgctgatgcagctggtagacctgaagatacagaagacgcccggtactgctgcgcgtgatatgctcctcgacaaatatctggtcaggacatttgagcaaatgatggcgcttgatactgaagaattgttggactctgatgggcgtccgttgttttcacctgaagacaagaattcaagtattgacgcctggtataaagaattcgggtttcaaagaacggttgacaaatctttccctgaatttgggttctttgtaccagaaggctctgatggccttattacatccgatggcaaccagttctcggtttatatcgagggtacgcgccgccggacattagaccatacccgctggctgaaattgttgaagcatatctataaaatacggggaacacagaaagcgatagaattgttcttctggatttatttcggtgttccagttactgtgtattacccaaaagaagatttggctggtttggatgctaactttgattgtgatggtgaagttggtctccgtgatgattactactatgacgaatacacatatgtcataagaatacctggcgacgtcgcagatttcgaaggtgtattcgatcgcgtgttccgtcaacacttccatccatctggtttcaaagtattcctcgaaagcactaggagttaagaaaatggctgattatctgagcaaatatacaggccagcagatagataatattctagatgcggtcgatggaaaactgaacaaaactgatgtcgtgaacgatatcacggtagatgacgacctgtctccggcgtcagcacaccttacgttcgtcttgaaatctgctatcgatacgatgaacgatgttttgaccaataaagtcgttcggaccgatgggcaagaacaaacgataaacgggaaaaagacttttgcgtctgtggtgaatgcaaatggtggcatcgtagtcccgacccaacgctccataacgatcacggatgaacctgcggccaacacggatgcggtgaacctcagcatgttgaaaaaacatggtctgagcactgtggactccgttggttctggttctggtctgaagatttcgttgctttccaatggttacaacaaattggaagtcgatctctccaatcttgtcgtgaggacagacgcagcgctccctcaatcgctggctgtgtattcaccaacaggtgggtcacaaatatggtctatgacaagtctgtttaacagtatattcgctgacactcgtttcaacgattacgtgaaggtcgtggattatgattcagatatgctgaacattgaaacgcaattcaccagtgtcaacaaccgtataaacctgaaactggatactgcgacatatacgacgaagatgaccagtctggattctcagatagcgaatttgcaatctgggaaagtagataatacgacgtatacggcgaaaatgaccagccttgacagtcaaatcagcggcctgtctacgaataaggttgacaaatccacgtatgacaccaaaatgaccagtttagatagccaaattagtggcctgtcttcaaacaaagtcgacaaatccacgtatgacaccaaaatgaccagccttgacagtcaaatcagcggcctgtctacgaataaagtcgatgtgtcaacgtacactactgatatgaacgccttgaatttggcgctggcgggttcggtgaaattggctaaaaccaacaccaccagtgtttctgtcccggcttctggtagtgctgcgttgcctgattttactttggtgaatctgtgccaaattttgattacggccaaatggggtacattggttgatacgttcttggtcacaatgacgtatgacggtactcttcaggcgacgtcgttgacacaaaaaagtacggcggggactttgtcgttcgcaggttctgttgtttcaggtaaactacgcctgacaatgaccaatgctaatacaacaaccgcagcatctgtcgattactcacttcgtgcttctttctaaatcttaaactaaatacccctagacgattacatgtgctaggggtattttcaaatggctaataaacccacgaaaccaaattttccgcttgggcttgaatcacaagatcaatccgtatttcaagaaggtattctgaataatggtgttgtagaacatggcccagatgcggtaatgactgtgccagaaactcctgacgcatctggggttccttctgctgtccgttataacgaagacgacgatcaattcgaaggctactacaacgaaggcggatggttgccgcttggtggcggtaacggtgggcgctgggaactccttccgtatgcctcctctaccctgttacaagcaggacgtgcatatctgatagataatacggacggcgtctctacggtgctgttcccttcccctaaacgggttggtgacagtgttactgtctgtgacctttatggtaaattttccacttatcctctgactgtagacggtaacggtaaatcgatctatggctctgcggatagcatgacgatttctaccgataacgtcagtgcgacgtttacgtggactggtgaagcccgtggctgggttattacatcaggcgtcggtctggggcaaggccgggtttatagccgcgaaatttacagccaaattctgtcagcgtcaacaccatctattaccctgagcactcaaccatctattgtagatgtgtacgttgacggaaaacgtttgaaagaatccctgtatactctcgacgggtatgaagtcaaattcgatccggcgttggcctctggttctgatgtgcagattgttcagtacatcccaattcagctcggcgcgggcggcgggggttctggtggcactgtaatcacctgggaatacaacggtggttcagctatcggcggcgaaacccaaatcgtgttggacgtggtcgttgactcagtatctgagatctacatccgtggttcccgtcaacagataggacgtggattcacatttgatcctgccacgagtacgattactctggcggatgaactggaagccggggatgatgtcgtcgtcgttatcaatggtgaccccaccgtttacaaccaaatcgatcgttccccgcaagaagtggcgcgggccaacaacgtcaagaactctgaagtcatcctcagcaccgacaagcaaactgcgttggatggcaaaacagttctttatgatgttttaacacagaaatactggggtattcctttgggtattccccaaggggctaaaattaaaagcgtcgattctggatctctgacgtacattccaggagatataaacgtagatttaagtcttttggggtatgagttgctgaaggaacaattaagaacagatgatccaggtttaggtacgaacctggtctacggggcgctaaagcaagtatccatcaccagttttatgtcgttagcagatgtaatccgttttgataatggcgaacttgttaatgtcgatgctgctattattgcagccaaagccgcagggcatgagcatatttacttccctaacgggcattttgagttatccagcacaacggcattaagcaatataatgctgattgggtctaataaatcccagtttggtgatattaaattagaaaatagtgacggctccagcggaaaactgtcgcttgaaactgatggttcagttcttcatatcactggagatgccgcaactaatggtattacgctgtcgaactctggttccgggtttaccagtagccttatcgggattgttggtttctctatttattatccagaccaggactggaaagactgggtacaggggaccacggcagatatcgatggcgattattactatgaaccaacagtttatccaccaacatttgttgccgatgtgtctatgcgtgttgtttttgataacttattcttcatcaacgcatatcattggatagatatcaaaaacgcgcagctggttatatttggtaaaattgcaggttcgctattgaatcgtggatataccgtaacaagaatggcggctggcggtgtaaccgaaaactttaacagctatccattctggacatgggcttgtggttttgctggtatttcatcgcgtgttaaccattactgtgatgctgttggtaaagcaatccaggttggacttgatgacggcgtaactcgcactgtagagcagatgcgtatcctccatgcggctatcatcggctgtgctgacggtattatctgtggcggtaagggtgtatccattgttgatgccaaaatcgataacgtaatgcgtggtatcacaattagcgacgatgacaactcggcataccatcagattggcaaggtctggatctcatcttactatcgcaacaactacattcctaaacagcgaaaagacggcaacgtttacgggtttaaatccaatacagcgacaccgattgatttgtcaggtctgcaggtagttcgtgctgacgggcgtggtgtatggatgccgtactcctctgggagccaggttggccgttgtattgtacagcagtgtatgtacaaggcatacacatttggttctcgtggtcgttctaccgacgttatatcggttagtggttgctatgctggcatgtacgtcgatacttcgctgactgatcaggtggcattctcgtttggcgactttatgcgctgtgatattaagggtcttcagtggaagggcgctagcaacgtcacaccgttcgaacttaacaatgaccttaattactacgaggaaggcaaggagctagatttaacatccctgggtggccggttctacaaagggtacagcaacaccctgttcacccaggagcgaggactccgtggttttattaacagccttactacatcgtcaacggcttcactggaggttttgcgtcttgcaggcaccaacactggtggtaagattcttaacgtcgggctaggtatccggaacacagtttctgatggaacgggttatggtgctctggtcctgtatgcgtctcttgctggcacagatactcctattgtagaggtgttcggtgatggtgttaacaccggattaaggccgctgacagacgcctcacgcgacctcggagatgctacacatcgtttccgcagaggctatttctctaactcactggaagttggcggtaatccagtcggtgtaaaggtcgcggttccctcaagtgcgactgcgcccggttcggtggggcaatgggctgctgattcctcatacatttatgtgtgtatcgcggcaaatacctgggtccgttcagcattatctacatggtgatattatgaaaataatcgtaaatacccaaaaatcattcgtggagggggtgaatccccttcgcgtagattcttacattactgaactcaaagaacgactgctgcttttctatccttcagcggaaataattgtgacagcagaagaaagacgtaactatgttgaggttaacgacccggtaaacattactgatgaacagacggtcagtaccatcactgatgagatttttaactctggaaattggttgagaacaatatcttaatgacctaaataccccatatcggtaacgccttatggggtattttcaaatgaccagaaacgtagaagaaatcttcggtggggtagtcgtagcaccgcatcagatcccgttcaagtacacttcaacaaacggtggggaaactttcctttccctgccattttatcccatcaccggatttgttactatcaacggtggtgtgcaggttcctcttgataatttcgaaatagacgggaatacattaaatcttggtcgcgaactggatccaggggatgttgtattctgtttgttcgataaaatcatgtctcctcaagatgcgagcaataatgcagttcgtatctacaaattcctttctgttgggggtgaaacagaatttactcctgatttcacaacttatggtgtccagtctttgtacatagacggaaaatacaaaacgcccggcgaagattacaattatttcaaaacttcaggtaaagttgtgctggacactgcgttgaccgcaggtgtgtgggtagttgctgagatgtctatcaagcaaaatattccagcgctggcgggcaacaatggtgcaagtatggtgggcacagctagtggggaaactgttcaagaagcattagatagtggcacacttgctattgatgcattacgccaagatctgggttcgagtgacgggctgaaattgattggtcaatgctcagatgtaatagctctcaggactattgaaccaacccaacctaaccagcgaattagcgtagctgcttattctccaggatgggctgcactcgcaggtgtgccagttggtggtggtgagttctactacgattcaaatgattccacctcagtagataatgacatttttgtgttcgttacaactgggggtaaacgctggaaacgacactgtaataaagactatattgatctttcctggataggtttgcagtcaggcaatgacattgcaccatactggcagaaagcaatagacttcattcataatgcggctatagggaagtcatccatctatgacctcccttatatcaggattacaggtggtagttatctgttgtcatctactgttacgacgcctccgtacatatccacagtatttacaaaggatacaaaactagtagcagactctttagttgatggaacccatgaagccgctattgttatttactgtaatgatgcagtaaatctgtataacaatgacaggagttcttcattcccgaaaaccatctcatgcagcgccggtaaggttaggctggtacgagctggaacaagagcgacaaccaacccaattggtctttataccaaaggtgcaacatcaacagcgcacgctatcaacatgagagtttcagatttagaagtctatggtgcgttttcagctggtcatgggaacacagcgacacgaacctggttgatgcgcttcgataactgtcagttcaatggattttatggtttagcttactatggcacaaatactgacagtggtgagagaatatcatatagcaactgcgtgatctcaggcggatacaatgacgctacgactaaagccatttacatggcaacatctggaataaatatccatcttttatcgtgcagcatagattttactggcggtgatattatctatatgaccgcttcagctaagtggtgtaatattgaagttgaagactcacatattgaaagctggaacggttatcttgttaatgcggagtcaacctctgatgtagccaggttcgtaacatttcgtggtacaaacctgttacctaccgggtcgcttggttacgcgcagtcgctttcgagaaaacttctcaaaggtgcagcatgtaaagttctttttgacgacagtttcatttcatggactgtatacccttacgactcttacgacagcatccttgaaactggatcaactatcacggtacgcgttagaaatcacaaagatttagcgttaggtttgcatccgtttactacggctaaccgtctgttgaaagtatatgattttaccaccgagtccgtaggtaatgtgctgacatctagcacatcaacgacaacaacgacgactgttagaaaatacagttccagtttttctaacgtgacagcaatcattgctgcgcttgataactcgcttatcgatacaagtctggcgtctggtacgactaacacgctgaaattaacatggggtgcaagtggatatgcttatattgaaacagtagagaaggtgagagtaacaccatcccgtgattacagcatgaaagctacggtcattatgccggatttgacaagcaaactgaatttagcaccagcaatcgcgtggtatgatgagaacgatacactcatatcaaaaactgatatttactatagtgacatgaatgccatagttaacacggcaatcactggcgttgatccatatctatcacgtgcaaacaaaagagttgcttgcaggacatcagcggtcaccgcacctgctggtgcagcttacgcacgtggggttatgcagttaaccaatggaaccactggttctatttactacttgactgactataatttgtttatttcgccaacaaattaggtcgttgcgaaaacaacacgagctggacggcgtgacctagcaatgggttcacgcctaattaacgaaattggactattttaagattaatccatgaataagatgtttacgcggcctactgcgtcggtggttagacactaaaggtagattttagatagaatagaccatccaagaaaagaaatctatgtggaagaattgaaagatcgtctaaaattttgtgtctatcggctgaggtttttgtaattactgttgacagcaacaactatgtgatagtttctggacaaacgtctattaccgatgaacaagtaattgatacaattgtttcgggaataattaattccgttttataagcagtactaacgaattccgatatcatagaaaaacaacaggagattcatcatgaatccgcaatttagtcaggccggtggttccgtctctaaagacgtgaacaaacaatctatcgcacgtgtatacggcgttaaaatgagcgaagtcgcttatttgaaagccggattagtattgaatggttataaggtgttgtttgataaaacaacccaaacttgttggaaaagtggcaacgccacaggtacatcgatttcctggcaagtctctggtagctctctgaacttagtaactactactggctcgtatgtactacccctttttgacatacttgcaaaccttggttcaggcgagggacttcttcaaataggaagtgtagctaccattgctcaattatccacagtctcccccgtaacggtaggtcagcgcatacaagttaccgaatatgctttaggttatgtagtaggtggtggtaactttattgtacaaaagtcatctgattatacggttgacggtgggaaggtagtggcatccgcaacgtcggggttagtcttcgtacgtgaggaatactatgcgtcccgcactgttaagcccgaatggtacggttgtcgtggtaaaggctcggccatacccgacacagttccgtttaaaacgatgctcggtgcccttgttaatggcgactacatcagattgatggccaatgctgtttattacaatagctttcccaataattcgcaggcaatagatgggtggacaataaccgccgataatatcacattagacggtgtgggcggcgccaccctgtcccgcgcaacaccttcatcagcaagctactctggttttaccacgctcaagattgccggcagtaaaaacccgagactggtggggtcactgctcatcacctctgatgaccccaccaacaggcctttatacgcataccaaagtttgaccaaaatcgactcaagggagattttcacatctcccttggccaatacgctgggcctgtgggcgtctggcgttgatggcctttatatcgataaatcggtaatactggaaagagctgtcttcccttacttcgccaataacggcacaaagaacaaaaaggtgttctgcactgccagaaaatcaggtcagatttacccgcagccgacgtcagcaagttcagatttggcactcggtagtaccttcaagctggatgcgtgttccgactttatcatggaggttgttgccaatgattcggcatatgcaggcattgagtctgagagtaacaacgtcaatggcagcataaccctagtaaccaatagggcgtaccatgccggactccatttatggaacagatgtaagaacattacttacaaggtctccgcgacggatatcgttgaggggggtggcgttattacagggtatggttgcgaggcatgtagcggtgacgttacagcctataacgcacaatacgtcgcggcattcataggaaattccgcaacaacccccgttataagctgcaacgtaaaaggctctgggtatggtgtgactgatgctgttgtattctatacaacggctgcgaataatgcctatatccagcactgtaacgtggatattactgccgtgcacgctgatgtattctccatcggcactggccgacaatcagctatcaagttcaatggcgggcagtactgtgacatcaaagtaaatgccaaagattttgactacatattttcacttggcatgggggcaaataacaaatttaatgttgcatataatgcattcaatacagcgttctcgtactcagatcaacgatcttttgacaatgagtataaatacactgaccctgctggcagtgtgtaccatttgcaggcaaagggaagttcttatgagtacaggtcagatgctgtcactaacccggttcttgggtataaggcactgctaagaaagcagatagttacagatgggtttgttaatccgaacctgccacaaacaactgcatcggtgggtggtttttactatgacccaaccacgaaatatgtaagggttaatctgtaaaggtgaaattatggttgaacttgatgagatgtttagtaaccgtgcagtggttgcacaggctctttcggaggctcaggagatggccgtccagactgatgatggaaacgggggggaacttaccctggaagaccaaatagcatttgcacaagctcaggagtaggtattctgacagcttataactggtgatggtaatcctgttctaaggatatcgctgcaatggtttaaacaaagccccttcgggggcttttcttttgaacaaactaaatacaaggagacattgttagaaaaacaacatgaggatccacccatgaaaacgcagttcaaccaaccccaaggctcgacttcacgtgagactaacaaagaagcgattgctcgcatctttggtatcaagaagtcagaagtcggatatctgtcaacaactactccaattgattcttatgtcatactgtttgacaaagaaactcagacttgttggtatcgaggtacagcgactggtactcctgtcagctggactgtaacaaataaattgttgaacttaacaacttctaacggttcatatgttcttgtggcagggtattctggtgatattcttcgtcaagacctggcatcaagcgaagatggtttgggaagttatttggttggtgcggcccgtaacccattagctgcggctatatctacagctatttccgttgctacggcattaagttcaataagtgtttctatctgggagttcagaaatcatgttactgacagacctgatgaagaagaccaaaacacgtgggattggtctcctgcaatagaggctgcatttaatagtatagggacttacttgccttatactatggggactaacacccgtcatgcatcagcaacactactgtttcctcctggatactacagatgttctgaacaggtactggcagatttttcatcgtattccgggtatgtatatgggagacctcgcctcactattactgggtatggtgcgtctattggttgtggcgtagagcagaattttacatggaaagttattggcacattactgaacatgagcggcctggattttgttacggaccccactgttaactactcgtatgcaatgaaactcggagatgaaacgaagacaaccagtaattatgctgtaactggtgttttacgcgatattcgtggtttcaacctgacaaaatttgtaactttcgcatgggcttttgatatgcgtattgaggggccttacgcaacaggattcaagcaagatcctgatgtggcggaacctgcaacatactttgaaatacttgagcatgtatctgataactgtaaccatttagtttttatcagacctcaaggtgaaacagctaataccaaaaattttgaatattttagaattaatggtaactcgcatttgtccacccaccacaacatacatatgtttggcggtcattttgagtctcaccaatatggcattaaatttattaatgctgtaaaaaatgcaagcggcaggcctgccgtacatcagtgttcgttcaatggggttctgttcctggagaatggaagtggtaatgctgcactcgatgctcttactccggcggcaagcactaacctgcttacgcttgatcaagcctcctgcattgaattaaattgctgtcgtgttgctacaacaaacagtactactgagactttcgacagttccaagcataaggctctgattaagtattctggctcagcacttagccttgtcatcagaggtgggtattttgttactgcattcgccagcgtagctggtagtaaccaaaatagatacacacttattgatataagtgagcactcagcaggcaaacgtgcagtagaatttgcaggacgttattcaatgaataacttctcaactgcacatagcacaggaagagtgctatcaggttggacatctggaaacaggaaatggattgaagaagtttctgatgacggccttgaatattcttggtcttactctacttcttcagatttaacaggaacacctactaaaatatttagtgttgatagttcaggtacattttctgttaatggcatcaaagtcagcacatttgatgcttcgtctgtcctacgcattgggtacaataatacaaccccaggtcagcgaagcataaacttctatggtgctggtactacggacttgactggacaggtttatggtaactcgtctggtagtataaccgtaacatctacaaataatatattcttagccgctaacggtgggtcgggcgagacgatgtacacggggaatctgaagcctaacgcaacaggttcgtacagtttaggtacgtcgtctttttatccaaataatatttacagtcagaatgcggtaactgttgtttctgatgtgaactataaggcgaatgttaaggttctttctgaggaagaagagtaccagaccttaatttcagccgtaggaagcgtaccgttcagcgcatggcagttaaaatctgcaattgctgagaaaggtgaaggctctgctcgctggcatgtcggggttattgcccaacaggttaaatctgctattactgatgccgggttggactggacaaaatacggcttgattacatatgagtcattcagtcaggaagtaacaaaaggtgatgatggttattactatcctgttgttgacgaggaagaggcgtcggaaatcccagttaatgcatctgggtacatagatgccatagacggggcggacagtgtgatcactgctgatgatggagcgattacgtacaccagagagatttacatgctcaggatggaagagtttttcgtactgcgaatggcatatatcgaaagcaaattatcatgacgtggtccgtcagaaatggcggagtgtcaattttgggtgatgttatactttaactaaccaaacaaagccccttctggggctttattcttcatacgatgggttgtgtggtatactaaataattccaagacaaaactctatagatggagtacaaaatgcaacaattgaatcttaaccgccgcccttattgggacgactggaatccagagaagcgtttcagccgcatcctgttccgcccgaatccaatcaaagtacagactcgtgagctgaaccagctgcagactatcctacaggatcagattgagaagattggtaatcatcttttcaaagacggttccatggtgatcccaggcggtttgactattaccaattctgctgtatccatgaagttccagctggcgggtgggagcgaattcactgacctcgaaggcattcaagaactgtatgtgattggcaaagacaacaacgccaaggcccgtgtattgtctctggagcgctacaccagcgaaccggatatgatgttctgtatcctggaaatgaccgagtctggtactgccgatggattcagtccgaacgataatctatacttcaatacctatgatgtgaatgataacttcatccgtatcggttatggtgttgctcagactgtcggtggctctattgttgctcggctgaccaaaggcgtctatttcgttcgtgggttcttcctcgacgttgacgatgatatgttggttgtcaacaaatatgcaaataacaccagccatcgcgtcgggttcaaagttactgaagaaatcgtgactgaagagcaagacagtagtctgttctccaatgcccagggtacaccgaacaccaaagcgccgggcgctcatcgcttgcgcctggatctgagccttcaggcgttcgattatgacgcagaagtcgaagatttcgttgagctggcgaagatcaaagacggtaaaatccagtctatggtcacccaatcgacgtacaatatcctcgaagacactatggcccagcgcacctatgagcaagctggtgactacaacgtgtctactcaccagatcgaccttcgcgaacacctgaaagaaaacaacaatggtggggtttatactccggccgaaggtggcgatgaaagcaaactggttgcggtaatgaagccgggcatttcttatgtccgtggtcgtcgtattgagaacgtcggggaagaactcgtcgtcattgataaggcgcgtgatacagacctgctgaacaacacaccagttgctgtagcgacaggtaatttcctggcaaccaagaactctaaaggtgttcctgttatcagccgtagtattcgctacaaattgctgaatgcttctggtgtcacccaagcgactgccctgtgtatctccgccgaccgtaccgggacggaattccgtctgtatatgcgtgacctggtcgtcactggtgatatgagcacggtcaccaaagtcgcttacgaagaaagcgggaccacgatgttctcggccgcgctggaaacaaatcagttctcacaaagttcatctatggacctcatatttgaacttcctgtgtttggcgtgaaaactttggctccgaccgggacgattgatatcaactacaccgtcttgcgttcttacaaaattacgctggatgcgtcaggtaacggttctatatctgcaccgctgggatacagtttttctccggaattctcactctactccggagcgaaatctgacggaaccgccgcccagatcgatatctccagtagcctgtctctgaccgggacaccagttgggtcggctctgcagatttccctcggttccggtaatgctctgcagtctatcaacctgttggcgctgatggtacgcaccactgctatcatcaaaaccaaaactgtcacgactgcgactgagactgtgaccttcgccaaccaggccagcatccagcttgcgaaccatgacggctataaattgacttccgtcaaaaatgccaatggcgctgacgtgacctctaacttcactctggatggcgggcagcgtgatgcggcgtactacaagtccagtctgatatcggccactggagccatttcaggcgcgtataccgtggaatacacgtatttcgctcacagtactggtgacttctttacggctgattcgtatacttcgattgattacaaatcaatcccgaattatacgtcaagcacttctggtacagtgtatggcctggccgacagtattgacttccgtcctaaaatcaccaatggtgcgtctgatactgatatggtgcggcctaacacggcgatcatcatggacgttgaatattatctgcctcgcattgatgctgtgtacctggcagataacggcgttttcaacgttgcccgtggtatcagttctaacaacctggcggctccggctattccagcaaacgccatgcgtttgtacgaactgttgattcccccgtatactccggatattgacgatattcagatccgtactatcgacaaccgtcgttacacaatgcgggatatcggtaagctggacacccgtatatcgaacgttgaatactatacaacactgtctcagctggaatcttcggctatgactcagcaagtattcgacccggtaacaggcaacccacgttacaaaaatggtatcgccgctgatccgttcaaagacttccgtctgattgatgatctgtcttccgactggatgggttccgtcgacaccgacaatggtcgcctgcgtccgtttgtacaacaaaacgcgattgatctggttccggatggttgggacaaggttatggacggtatggtcgtgtgcaaatacacgccggaaatttctgtcaatcaggaatatgcgacgacgacgatcaacgtcaacccatatgctgtgtttaactggacggggttcctcaaactcaatccgacaacagattactggtttgaaaactactatgttgcccctcgtgtgatcaacgagacgatcaatacccgtggcgctgtcaaagaaggtacggtttatggtacatggcggaccgtgtctgtttctgaacgtgtttgggaaccgcatggtgcaggcggtgtttggtggggctatcgttaccgcacgaccgtttcaactcgtgatgtttcgacttacacgtacacggatacaactacgacttcactttctggcgaacagattgttgaaactcaggttattccgtacatgcgttcaatcgaaatcaactttgacgccagcggcctgcgcccgttcaccagaatgtatgcattcttctctggtcgggatgtgaatctgtactgcaaaccgaacggcggggcatatggtgcgccgttgacgacggacgccaacggtaatctgaaaggtgtattcaaagttccgcagaataacaccattaaattcaatactggtgacaacgtcttccgattaactgacagtccgactgatagcaagtctgctgatgatactctgacgaatgccgagattgttcataagtcctttggtaagaaacaaggtatccagaagacctatgttaacacacgtgtgctgggttatactgtatcgactaaatctgaaacaacttcgtctgaagccgttgttggtcagtggcgtgatcctatcgcacagtctttcatggtggcgaccagcatcggtggtgaatacattgaaggcgtggaagtgttcttctcaagcaaatcacgtgatgttccagtaactctggaaatccgtgagatgagcaatggcctcccagcaagtactgttatcacccggaaaactttgaacccgtctgacgtcaaagtatcgaatgactcttccctcgggacgaaattcactttcgattatccagtatatctgcaggctggcacagagtttgctatcgttcttctggctaacacccaggattacaatgcttacattgcagaaatgggtaaaaagaacttgctgtcgaatgaatatatcgccaaacagccgtatactggcgtgttcttcacctcgtcaaacggttcaacctggtctccaaaccaaatggcggatatgaaattccgtgtgtatcgctgtaattttgctgctgccgacaacgtggtgacatttactccgaacgccgggcctaaaatccgtcctcttggtctgaatgtgttgaactgcgtcaacggttctactgtggtcacagtttatgcaccgggccatggtcttgttgcgggcaactctgtgacattatctgaactgacgggcggctgcggctttaccgcagagcaactgaataaagtccacaccgtcacggatgcgagctatacttcattcaagattgatgttggcgcagcggcagacagtgatggacagattggtggtgaagacggttctttcttgggtaattacctggtggatatgttctatgccagcgtgaccaattcagccctggaaggttctatattgaaactggaataccgttatcgtgattctacttccaattctatgtctgattgggccgagtttgaatctgatactgatgttcctctgccgacagaaggcatttatcgtcaggccggggacttccaggtaagagccaccatgactcgcagcgcgagcaatgcgtacacggcaccaatgattgatggtgatgacttaaccgtggttctcaactcacatggcgtagatcctttcgaggacgttttccgctatgtgaccaaggacgtaagttttgacaacccgtgcacaactttgaaaatgtacttcggcgcgatgttgccttctcagtccaccatgactgtacaggtcaaacttctgcgcccagggcaagaaatggattcgatcgaatgggaaacggttacaccgaattctcctctggtcaacgatggttccgcattctttgaatatgaatacgataagaccgtcgacagcagcagtccattttcagccctgaaagtcagagcattaattcgcggaagccggatagccccaccttcctgcaaagatttccgcttgatcgctctggcataaataaaattgaaatggcggggatacccccgccctctttagaggatatgtgtatgcgtggaatgaaagtacaggggcacgcatcaatggtacgcagtagctcttgccccggagcgatcatctgcactgaccatgttgctggaatggcggctcttcggtctcgccaagatactgaacaaagagaggctaagattgctcagcaatcggcccaaattgatcagcttgaagcaaccgttaaaatgttggcagaaaaactcgggattacaatcccggacgggggcgaaaatgacaacgcagaataacagcttgtttaatgttaaggaaatcttgactgctgccgttgcatcgttgttagtctcttctgcgacattcgtatggtttatgggtggattagaaaaccgtgtgaatgttctggaaaaagactctgggaaagttgaccagattttggttaaggttaatgatctcagtgaaaggatggccgtcatgaacaacgatatatcctacgttaaacaaaacgtgtcagaattgaaattaaacagcagcagcctttctgacgacgttagaacattgcgcctgactgtttcagatatacagcgcaaggagggtgtcaatggccgtcaataagattcgggacaaagattcatttatgaattatgtccttcgcaaattgggtgcgcctgtcatccagatcaacctcgacaaaacacaagttgaagacgcggttgatgatgctttacagaagttttgggagtaccatcgcgacggtagccaagatgcattcttcctttaccaggtgaagcaggaagacatcgataaaggatatatcacctttccagaagatatcgatgacgttgtcgaagttatccaagggccaccaattgaatctatcggtaactgggcaaccccccagtggcagatggctcaggcgatgttagtgcccaaagctgctttggtatctatccgtcttatcgattatgttgctatgcagcagcgcctttccgatatcaccagcgtcctcaatgtccgcagggcattcgtctacaagaaattccagcgccgtctgtaccctcaattctcagctgttatcgatgaagtcctggcgttcaagtgctaccagaacatcgacccaacagcggaagagaacacagaagcgtggaatgatatgtggctgaaggcttatgcgaccgcattggtaaaacgccgttgggctgaagtgctcaaaaaagcccgaggcatccgtctccctggcggtatcgaactggatggcgatagtatgttcagcgaggcagaggctgagatcgagcgtctggaggaagaactgcgcactggtcaacagtatcccatcgacttctttatgggataacaaaaagccggggtttcccggctttgttttagagtttgatgtcccgaggcccagggagcgaagtcgcctgaatatacccatcatggacgttattactgtcccaccattcaatgaaatcattcccgtcagattgttttaccaaaccgacgatatcgtaatcaccacctgagattttagcatccacacagatgattcttactcgacttccatcacgagtttccttgatgtcttcaacctgcattcgtcaattcctcaatagaattaaacatcgactaaataccttcaaaattgagggtatagccatggccacttcacgatatttcaactacacgaaccaccaaggcacgcagaagttaattgatgacctcgtggtggagatgatacaattacgtgggatcgacgtcaagtatattccacgcgccatttatgaaaaatacccaattttaaacgaggcagaacaccgtttcgaccaggcgtttgatattgaggtctatatgcaggattatcagggcttcaacacccaaatgtgggagaagttcggcggtatccagctacaagatgaggtgacatttactatcgcccgtcgccgctttgcggaagttattggcaacgggccaggactggatcaacaacctcaggaaggggatctcatttatcttccgatggcgaataaaatattcaaggtcaacaacccgaataatgacgaagacttcatgcaattcggtaaatggtacacgttttcattaccatgtaccttgttccagtatggcaacgaagacttcgatactggtgtccctgaaattgatgatattgataaacgtcttcaagatcttgaaggtgatggcatttatcaggatgccaccctacagacagacaaccagtttgctgatgagatcgaagaagatctgtctaccaataatgtcaaaatagactttggagaataaccatgagaccttttcagaattatttttaccatggttcactcctgaaatatatccatgtgttcaacgctattatgtctgacgttcaggtgaaaaccgagcgcggtattatgaaagtcccgttacacatggctattggtcgtcgtaatgacctgaaccgaaataccccggcgaatgcattaccatttgcgacgatgtctttcggtcaatttgaaatcaataaacaggtaacgaattcgtatcacaacaaattggcgactaaaactgcgacgtctaagcaacgaattccaatcatcatcgactttgaatacaatgtgcgtacaaagaagatgaatgaaatgcttcagatcctcgaacagatttattctgtttacaccccttcaatagattgccagataaaggacaacgaaacgctcaagcaggatcaggttgtgaagatccaattggtgagccatacgatgtcagataactgggaaggggatgctgctgaatctcctcatgtcgattgtaatttcatgtttcagcttcatggtgctatctatggctgggattattgggttgatgacggttccggtactggtgatccaaacgttatcaaggaaataattatcgaaatgtctactgatttgaatacaccgtggacggaattgcctctttggtttactgttgacaaagacggcgtccaccatccagaggatgattgattatgtctaatatgtcagaacgtttgttacagaccttagatgctgtctcagcacgagatgaggttgctcaagatgcgatgaagaaaaccgcattgaagcccggtgttgattatgatgaagaaacgggggagtggttaggtgatcccccggaagggtatcaaggattcgagatgccgccatcattgtctgaagtcgcgtcaaaagaatcaaaagttcctgaatacgaggacactgatgccacgactgactacaaacgtattcgtgacaccacatatgctatgcaagaagccacgatgttcatgatgggtaaggccgctgaactcgccgcttctacagaggctcctcgtgcatttagcgtcttccgcgagctgggtgaactcatgcgtggtctcaataaagacctgatggaaaaccagaaaaccatcaaggatgttactcgcgacaaagagccgccgggacagaccaccgttgaggtttctgaagatgaaaatggaacgactacagtcaaagtcggcaagaccgctcggtcgtccagagatcttctccagatgattgagaaagttcggcgtgacgctgaggccaatcgaaattctcgtgttaatcccgatgaagaagtaattgacgtcgcggaagaaccaaaacaggaagagaagtcagagggtgaggacgatggcgtatccgaagcgtgaagtcgaatatgccccggtcaagacggggtttaaaattgaagacgtcaaattgcgtatggaccaaacgttcatgcgcaagccgactgtgcgtgctcctcgtgttgaattagtccttactgatgagcaggaagaagaatatgtcaagtgtgctatggacgcacactatttcgctgcgaactattacaagatcaccactatcgaccacggcttcatcttgttcgatatgcatgattatcagaagcaattgttccatgatttccaggatcatcgattcaatgctgtcgtacaggctcgtcagtctggtaaatgtgttcggggcgactctgaagtttatgtttacgatactctcagccaggaagagttctctatcaccatagaggagcttcacagccgcttcgaggacgttaaccatgcagagccgttgaataccattggcaaacacaataagttcgtagatagccgcttcggcaaacgatactttgtgaagtctgacagtggttgggttcctgtaatcgcagcacacaagacaaaagaatatgcagaatatgtggtaaaaactgaaagtggccggacgattcatgtcgcggacgaacatctattctttaatgaatacgaccgtgaagtgttcgccaaagatctggaagccggggatgccatcatgacgcaagatggccttgaatgtatttctgaaatttgggaaaccggcgaatctcaccacatgtttgacctccaggtgaaatcatctgagcagcgttattacaccaatgggttcctgagccataatacgacagtggtggcggcatttctcctctggtacgcgatgttcaactctgacaaagagatcgcggttcttgcgaacaaagagaaacaggctattgaaatcctggatcgtattcgtaaagcatatcaggacatgccattcttcgtccagcaaggttgtgagaaatttggttcaactctgattgaattcgagaacggttccaagatatttgcatacgcgacttcctcggactctatccgtggtcgttctgtatctctactgtatgtggacgaagtcgcatttatcgaaaacgactttgaattctgggaatcaactttccctgctatcgcccaggcagagacttcgaagtgtatcctcaccagtacaccaaaaggccagcgcgggctattttatgacatcgtcacgaaggcgaatccagaacatccacaatacaacgacttcaatcttacggaagttccttggtacagggttccggcgtacaccaaagacccgaattgggaatccaaacaacgtgccaaacttggcgacgctcgtttcgatcaggaattcggtatcaagttccgtggttctgtcggttcattaataccatcgaaatgtctggacaagatgacatccaagttgtatcaggagccgaatgagttcaccaaaatctacaaaccctttgacaaaaccagaacatattttggtattgcggatacaggcaaaggggttgagggggactactctgtgctgaccatattggacatcacggaatatcctcatacgattgcagccaaataccggaacaacacgataccgccgatgatgtatgcatacacgattgccgatatgtgtactcaatatggtgaatgccctgtgcttgtagagactaacaatgatgttggtggtcaggtgatcacaatcctgtatcaagaaattgaatatccggaaatcgtgtttacatcaacagacaataagggaactggcaagaagatcggtggtcgtcgtcctgaaccaggtatcaacaccaacaagaaagttcgctctatcggttgtgctaacctgaaagcacttatcgaaagagagatgttggtaatagaagaccaggatacgattgatgaactcagtacattcgtgtttaccgggacccgttatgaggcagacgagggttgccatgatgactgcgttatgccacttgttttatattcatgggccgtgaaacaggaatggttcagtgatttaactgacaccagcatttcgagagatatgcgcggtcgtatgaatgcaatggagcaacaccaagtcctcccgtttggaggcaaatttactggtgatacccctcatgaagtacagcatatgccgggctttgggggtgtgaatgtatttgatgaacgttctgggatgtcaatggaagagtggttcaagaactgatcactaaatatctttcaaattgagcgaaactctaccgagaaggaataatgttatggcaactacaagtttcagcgttgcgccgtctgtacagtggaccgagcgcgatgccacgcttcagacgtctccgtccgttgttgttcagggcgcgtctgctggtaaattccaatggggtgaagtagaattgcccgtgttggttactagcggtgagactggtctggtgaagaaattcttcaaaccgaatgatgataccgcgatcgactttctggtcattgctgactttatgtcgtatagttctgctgcatgggtgacccgtatcgtcggccctactgccaagaacgccgtgactaaaggtcagagcgctatcctcatcaaaaacaaactggattttgagaccgcaagtccgtcggcttctattacgtggactggtcgttatcccggttccctgggcaacgatattgccgttaacatctgtgatgcagcgtcattcccgacctgggaattccgtaacaactttgcctatgctcctcaggctggcgaattccacgttgttattgtggacaaagttggccgtatcaccgattcttccggtgctgtcggtcaggtagatcgtatttctatttctggtactgctaccgccgctggcgccattacagtagcaggtgaatctgttgcatatctgcagacggatactccagcaactctggcggctaaaatcggcctggagatggaagcgctgactgatgtttattcgagcgttgttgtgaaatcgaataccgtcattctgacccacaaagctatcggcccgcagcccgtgactgccgtggttcctgatgctaatggcctgactggtactgcgatcatcaccactgttggcgcatccggtacgatcattgagaagtatgaactgatgcagaatacccaaggcgcgaaaaagtctgatggtgctaatgcgtacttcaaagacgtgatcaacaacacttcgaattgggtttacaccttcactaatgccctggcggcaggtgtagttgaactcgaaggtggcgttgatgattacgacgtcaaccgtgtcgctgctatcgaagccctgaacaacgccgaagcatacgatgctaaacctgtgttcgcatactgtgaagaactgatcgagcagcaggctatcatcgacctgtcgactaaccgtaaagacacagtgtccttcgtgtccccgttgcgtgatgttgtagtcggcaaccgtggtcgggaaatggatgatgttgtggcctggcgtgaaagcctggtgcgcgattcttcctatttctttatggatgacaactgggcatacgtttacgacaagtacaacgacaaaatgcgctggatcccggcgtgtggcggtactgcaggtctgtgggcgcgtactattgagattgctggtatctataagtccccggcgttccataaccgtggcaaatacaacaattacaatcgtatggcgtggtctgcgtcttctgatgaacgtgctgtgctgtatcgcaaccagatcaacagcatcgtcaccttctccacagaaggcatcgtgttgtacggtgataagactggcctgacccgcccgtcggcgttcgatcgcattaacgtgcgcggcctgttcatcatggctgaacaaaacatcgctgctatcgccaaatactatcttggtgaaaacaacgatgcgttcactcgcagcctgtttagcaacgccgttcgtccttatatccgccagctggccaacatgggcgcgatttatgacggtaaagtgaagtgcgacgaagacaataacccggctgaagttattgctgccaaccagatggttgctggtatctggctgaaaccagaatacagcatcaactgggtctatcttgactttgctgcagttcgtccggacatggagttctcggaaatcgaatccggcggcggtattgtcgcagcgtcataagacaccaaaccccgcttcggcggggttttacttcggggtaaataatatcggcaacccggagatttgaaatggtatatgcatataaaattgaaatgatatctaacaacaaggtctacatcggtgtgaccaatgatccgcaaaggcgatatgagcaacatttggccaatgcatttcaatataatgttgaaagtgaattgtatgatgccatgcgcaaatatggggcttccgcttttactttcgtgattattgctcaaaccgatgaagtccacaaatgggaattggaaaagcaattaattgctcaatacgattcttatgaattgggctacaacatgaataaaggcggtaacgatggaagtcatctggttggtaaagctgctgctaaattgacctccactggagaacatattggtatggtctcattaattgatccacgttgggatctctgtgagattgaaccagtacggaacaatgttgatcatggctttgatctcagtaaattgacgatcaaaagattaacagactaattagaattgtgtaactctttttggagaatgtataatggctacagtaaatgaatttcgcgcggccatgtcacgtgggggcggcgttcaacgtcagcaccgctggcgtgtgactgtaaacttcccggcattcgtagcgggttctgacaccattcgtgacgtatctctgttggctgtaacaaccaacaccccgacaggccagctgggtgagattctcgttccgtggggtggccgtgaactgccgttccctggcgaccgtcgttttgaggctctgcctgtaacgtttatcaacgttgtagacaacgccccgtacaacgcatttgaaatctggcagcagtatatcaacggcagcaacaacaaccgtgcgtctgctaacccagatgattatttccgtgacatcatcatggaactgctggatgctaacgacaacgtcaccaagacctggacgctgcagggcggctggcctcagaacctcggtcagctggaactggatatgtctgctatggactcctatactcagttcactgttgacctgcgttacttccaggccatttcggacaagtctctctaacgttacacgtggtgggggaatttattccccaccactaattacaagaaaacgttgaggacatataatcatggcatacggcaaaggtttctttggtctgttcagcggcggcggtttagttgacgccaaagttgacacggacaaatatgtccagagtcaagaagagaagctgctttcaaaagcgactgttgtagctctggacgacgctcaggatggttcagtcatcctccagggcggggccaacacttacaattatgttggtgttgagagcgagctgcttaatgtcaaacagcttgttgaagaatatcagtccatggctcagcagcctgaaatccgcaaagcggtggacatcattattaacgacgttgtcacctgcgaagaagatgaaacgccggttactatcaatctcgataaagttgaaggcatcagtgaagatttgaaagaacaaatcacagaatgcttcaaagagattatgaatttgctggactttgacgacaccgcgtatcagaagattcgtaaatggtatgttgaaggccgtcaggcatatcatgttgtaactgacccaaccaagccgggtaacggcattcagaagctggtcatgcttgattctcgttgcatccgtccagtatacgtcgttgagaaaacgatgcgagaaggcggcatcgaggcaatcgaaaaggtcactctcaagtattactacaatccgaactacaaccgcaaccaattcactggtcaatctgggacatctcagaacttccagccgtctcaacaggaactggtatttgacgaagaaagtatcgtctatgttgatagcggtgaagaccctttggcaaatggtgttgttcccggtctgctgaaccctgctatccgcccgctcaacaatctggttacggttgaggatgcgacggtaatttacgccatcacccgtgctcctgaaaaacgtgcattctatctggacgtcggtactctcggtaagaaatctgccgaagaatacatgactatgatgatgggtaaattcaaaaaccgtctggcatttgaccgcagtactggtaagattacgggcaacagccatctgatggggattgctgaggactactggttgcctcgtcgtgaaggtcagaacgccactgagatttcaacagtcggtggtggcgaccaattaggacagatggaccacgtcaattacttccttgaaaaactgtatagctctctgtttattccaaagagtcgtatccaggaagaagggagcatcaatattggcggttctaatttggctgagatcacccaggaagaactgcggttcaacaaattctgcgcaggtttgcgccgtcgttattctaaattcttctctgaatttttacgtcgtcagttaattttgaaaaagattactgatgaacaagattgggttgaaaaaattcaaccgttcgttacgtttgaattcacctcagacagttttatccgtgaacagcaagaaaatgaaatgcttgctggtcgcctcagtgccctgactggggttgagccttatatcggaacattcttctcaattgattacgcgatgcggaacattatgcgtatgtctgatgaagaaattaaggctcagcaagagaagatcaaagaagaaaaagataaaggcatgtatccgaaggttcaggctgatgaaagcggtgggtttagtggacaagatgttagcccgctgaaatggcgacctgaagtcgtacctttccagggtacgcccggcggagtagaagagtaaaaatttatcaactaaatatagaaaattaacttcggagatacaatcatgagcgcgatcgatattgttcgagccgtactggatggtgacatcgaaaatgccacggcagaatgtggtatggaacttgatgcccgccgtgaagaactgattgctcagggtacagaatacgttctgaattccctgggtgacgacctcagcactggcgcggaataggtgattaatatggaaatcaaagaaattgccacgttcgctgatttcctggcttcccgcatggacgaacagaaagtcatcgataaagtgaacgcaaaaggtaaacgccgtcgtcgtttaaaatgcgctcccggattcaaactttccgctgatggttctcgttgtgaagtcatgaacgccagcgagcgccgttcccgtaaactgggcaaccggaaagccatacgcgccaaaaaacgtatgggtctggggtatgaacgcaaagtcgagcggcgtaaaaagaaagccatgaagttccgtaaaatgatgggactgagtaagtaaggagcaaatgatgaaactgttgcgtgagatcacggcgataggaaaggaacttcagatcggggaagcgcaaacttccactggtgggaaggccatgttcatcgaaggtccgtttgtgatgtgtaaccaggttaaccgcaacgggcgcaactacgaccttgaaaaagtcggtcgccctgctgtggaagcatatgaccgggaatacattcaagatcgtcgcgcaatcggtgaactcaagcatcctgactatccatttcctgatatcgaacatgccgccctcaaaaccgagtcactcgtgtggcaaggcaacaatgcaatcgggcgggcgcgtattttaaacacccccaaaggtcagatcatccgtgctctggctgatgcggatttcaacctggctgtctctacacgtggcctgggtgagacagtagaagttaacggctatgatgatgtcaagccgggcttcatgcttaccgctgttgatgctgtcgaccgtccttctggacaagtttgttatgtaaaagcggttcacgaatctgtagactggcaacttgatgaatcctctggtatctggatgccacgggacatcaaaggtcaggttgtagacaatctggttaaacacaatagccagcttgaagacgacttcctgcgccgtcttgatttagctcttaaaaaattgggttgatttcagctcactaaatactgaaaaatcgttcagaaggaaattatcatgaaacctgaattacaaaaactgtttgagggcgttaatggcctcagcaccgagttcctggacaaagtgagcggtctgatggaggctaaagtcggcgaagcccgtcttcaggctatccaagagactgaacatgttgcccaccaggaacgtctgaaactggtggaagcgcatcagcaagaaatcgctaacctgaaagaaactcatattcaggaagtggcgaccaaagttgatgcattcctgaatgccgtggttgaagaatgggcgaacaaaaatgctccggctattgacgctaccatcaaaaccgaagcggctgaaaaattcctgtctggtatggtcaacgtgctgaaagaagccaacgttgaatttactgtagacaccgacggccagatcgcggcgctgactcatcgtctggcggaagcagaaaaacgtgcaaacgtttctgaatccgagctgaaacagatccgcgaacaagaaagtatccgccagcgcaataacgtcattgacgaaatttgcgaaggcatggtcagtaccaaaaaagaagtcgttgttggccttctggaaggtattcaattttctgacgcctcttccttcggcgctcgcgtccgcaccttccgcaacctggtagaaggtaacaaagacgactttactgacaaagtcggtaaagacaacgaaggtggtaaatcttctgatgataaggaaaaagacatcaaagaaggcaaaaaacagaaaaaagaaggcgacgatcctgatgatgacgacgacaacgacgatgaccctgatgaaaccgacaaagaactgaaagagtcggtcagccgtcagctggaagaataccgtcgtatgcgtggtctgaaaggctaaattttgcagccacagccctctataaaagggggcttgattttgaacgactaagtaatttcaacttaactgaatatcaatgtaaggaatgagcatcatggctaagaaacttgttactgaacaaatgcgcgaaacgtggctgccggttctgaatgaagaatccaaatctattcagccgctgtctgccgaaaacgtcgcggttcgcctgctgcagaaccaggccgaatggaacgccaaaaacctgggcgaatccgaagcgccgggttctctgaacaccactgtcggtaaatggcaaccggttctgatcgatatggcaaaacgtctggcgccgatcaacatcgcgatggacttcttcggcgttcagccgctgtctggtccggacggtcagatcttcgcactgcgtgctcgccagggcgttgctgacggttctaacacccagcagtcccgtaaagaactgttcatgcaggaagccgattccggttattctggtgacggtactgtacaggctggcgacccgtctggcttcacccaggctgagatcgaaggttccggcgctggcaccaccaccatcggtaaaggtatgccgtcgaccgacgctgaactgctgggctctccgtccaatccgtgggcgcgtgttggtatcaccgttcaaaaagcgaccgttactgcgaaatctcgcggcctgtacgctgattacagccacgaactgcgccaggacatgatggcgatccacggcgaagacgtggacaacattctgtccgacgtgatggtaactgaaattcaggcggaaatgaaccgcgaattcatccgcaccatgaacttcagcgcagtgcgtttcaaaaaattcggcaccaacggtatcgtagacatcgctcaggatatctccggtcgttgggcgctggaaaaatggaaattcctgaccttcatcctggaagttgaagcgaacggtatcggcgttgacacccgtcgtggtaaaggcaaccgtgttctgtgttccccgaacgtagcatccgcgctggcaatgtccggcatgctggattacgctccggttctgcaggaaaacaccaagctggcggttgacccgactggtcagacctttgcgggcgttctgtccaacggtatgcgcgtctatatcgacccgtatgcagtagcagaatatatcaccctggcgtacaaaggcgcaactgcgctggatgctggtatcttcttcgcaccttacgtgccgctggaaatgtaccgcacccagggtgaaagcaccttcgcaccgcgtatggcgttcaaaacccgttacggtatctgcgcgaacccgttcgtacagatcccggctacccaagacccgcaggtatacgttacctccgacggcatcgcccaggacagtaacccgtacttccgtaaaggtctcatcaaatctctgttctaatcggacagctgatctgaatcaaaccccgccatgtgcggggtttttctttatacaccctcagtgctattatattatggtctatcactgaggaaacaaatcatgaatctgtcaggagcagcaattgatgttctataccaacttttctggtttgggccaagagaagctggtgaaattccgtctaaatctggtgagttggaattgttgtctaaagggttgtgcgaaagattagatctggtttctacacccaaaggaaaagatactcatctctgcgttttgactccaaatggttacatccaatcccgcgctcttttcgtccattccaacaaacaggaaatcaaatcatgaacacaaccaatattcaattgtcaatctcttccctgatcccagcgttcggcagcaatctggaacaaatcacttacatccgtaatcggctggaagatgtggcgttccaattgggatatgtggaacctcctcgggaagtaaaagaagcggaggatgctgcggcaccttccaacctcatcgatgtgtatgatgaaatcgggcgtaaaacgaacgccgtcatacagcaaatttttgaatatatcgggtttatagaaaaagcgctggggaattcttaccacccccagtctgatttggtcaaggaaattggtccaacatctaatggcatttaaaagaagggcgcagttgcgcccttttatttgggggttttatgtactcaaatatctcaaactctgaagccctgtctttggctaaacgataccatttcttcaaggcccgcgccgggcattcctgggataaaaaggcgtggatcaagcaattacagatacaaatagagataatggagtctctatccactcagtgcggaaataacccattcgctgcccgttgtcttgaacaggagtatgcaactcttaaaatgcaactgaacactgcgatgtcacacgttttgcactcttaacttttctataaacagatttcaattattattcacccacaatctaaacgaggaacaactgatggcccgcgaagacaattcacagatttctaccaacgccaactcaaccttcaatgagtggcacaacacccttgagcgcgtagcacgttctcaaggcggttcagctgccgacgccgatgcctggcgtgaagattatgacaatggcaaaacgccgcgccaggcatgggaagacgaatggggatgggaagatgcagacactaattcgtaaaatctttctggataaaaaggggatggaatcaaaggtcgaaatcatcacgactcaaaaattgtttgagaaaggtgaaactcgatactatcttaatgtgttcctttaccttccagaatgcagcctgaaccgcgatattacccaaccagatggaactgtgatccgttgggaaatagccaaacaggaagatgttgaacacgacacgacactttgaagcgagatctatatcatgacaaataaattcatttttctggacgttcgcggtaaacgattcttcaaaactgatctggacgaaaagacagaagggttccaggggcgtttatcatatttgttgccgacaggcgatatcgacacccaaagatatgtggcggatgtacgggatctcctggattgtggttgggttgaaattcctaacccccaggtgttgacagtcaatctgtattacatgaaggaaagtgggaagtattattccaatggagaactccaccttccccgttcagaagtcaccgccgatccagccaagagttggtacaatgctagagaaaccgtccggaagatggttgatgaaggcaatttgcctggcctggtatccggttctcgttacgatgtgttcatgtcctgtgaagagcacccgtgttatgtacccactttggtgaaggtgaaatgatgaaaactcttgaacaaattttagaaggtcataaatcaggaactttgtcggcggctttagacggtcgcgatttgacccgtctgacacagttcctgacagttgagcaaattgaaagcctgggactgtcttttaaatctcctgaaaaacgtgaatcccatgtcccggttgaattcaccaaagaaaatatcctgaaacaactggaaaaggacgtcgcctttgggtttgaaaaggctctgaatcgtcgtgggattagttctagccttatgtacgaagtcgtacaaatgtggaactgtatccttgaagaaggtctcgaagattttgattcgtatgcgatgtacggccttcctctgtttaaagcaactgctgtcaaatacgggtttgacaacccaatcggtgatgatacaggtgccgaagatcattatgaagagcaggactattaatatgcgtaccaaaaagatcggatccagcccgctgactggtactatcttctacggcaccctggaaaccaaaaccagtatgtgggtaggggaaaaggttgatgtgaccaatgattgtgttgcggctacggctgagcacatgcgttgtgttgggaaggattattgtttcccgactttggacggtaaattcttggtattgtcagctgaaattcacgatactcttccggatagattcaaataatttaaaaatattcaataaacggggtttacttcttcaataaaccccgtatacttcatttcataagcagtacgacaccaactctgaaatgaaggaactatatcatgaacaatacaccaaccactaaaacccctctggccatcgatcctcggtttatcattgaagcaaaagcgaaccaaatgggtgcctatgtgtactccctgtatatcggtgaaacatacgttctctgtttgggtatagacggcgagaagaatgagcgcggtgtccgtgagcgttatatccccaaaaacgcagatgaagatgcgaccagatttgccaagcacatcctagaccgcattgcagcgggaaagccgtataaaaacggggaaaggggatgggcgacggatctgctgaataaagcgtaagtattcaatgtattctatcagggtatgattcgttttataccatcaacaaatagttgaggcttcaccatggcgaacaaaactatagcgacttctctaccacctttagattttagtttagaccaatcccataaacatcgtctgtctattcattatcgtatagcggcggcggtatcagatggcagggagacaattgagttttaccgacctgccacttcggccaaagctcatcgtgatacttatgttattttgcgtgaattacgtgaacttggggttgatattgaacccatgccgtgtagcaatcctttgcttaatctcttcgttttgagcaacttcgagaattggaaatgaagaccattattctcataactggttcgcgttctattacagagcgcgacaaaatctttgaaaagttagacgaactttctcatacagattccgtttgtaatctgtatcttccgtgcgagaccctattgatcgctggggaggctgtcggcgtcgatacgatctgcaaagattgggctgagtccagaggggtgacttatcttgggatgcctatccccgatgaatacttcgctacatatgggaaaggggctggaaacaaacgcaaccaggacatgttagacaaggcgttggagttatcacagaaatacaaggcggagatactgcctctggctttctgggacggttcatcgactggtacacaggatatgatcaaacgaatcaacaaagcagggttgcattgtaaggtcatgctcttgggtaagccaaaaaccaaacgccttctgtaatttgttaacactggagacgtcccatgatcatttttcaactgttttgctatttgttcactctgtactttctggttgctgtcggttatgaaaccttccgtgatctggaatcgagccagtattcatccaaactggtttatgctaagaaatttgctgtccgtttctggagcaattttctgtatcgcctcccctgatttaaatacccccatcaattgggggtattttattatgaatgcacaaatctacgacgcactagagcaaggcaacgcctttaccaacccgctcccgggattctctgctacttctcagacgttaatcaccagtggccaacaaagtatagcaggcattacaagcatcccggatacgtccgttcaggcggcgataaccgctggtggtttgactcctgccaaactcaatacaatgaacaccatgtacgggactgccaacaccgggatcgggactctgaattcttatggtgaccagaccgttaatgaggcatacaataggatcggaacttcagtatcctataaatccggcctcaaaagtattgaacgagaacccaccaactgcgatttgattaacaacgcattcggtgtcgtacagacacttggccgtcaatggttgactgcaatggaggatgctttatctccaataacagacaaagtccaagaactgtatgatctagccaaacaaggcgcggcggcggggttggccaaaatacaggcattagcctcacaggtcaacggattaatcaatgatgctgtagcaaaggtgaatggtgttattcagaacatcactgatgggatagctgctgagttagcccatatcgaagacatggtgaagaagtgtcttaatttctcctttgctaatgttcttggcgaatgggcaaaagatctttgcgcaggcggtgtcatcaacaatattggttctaatgatctgaaaaatgccctgaaatgatcagggcacagtccttgctggaagaactcccactggctcaataccttccaccaggagggagtttacgcctacatcgctcaacctaatccatatcttcccaccaggcttaatttcaaaaacgttcatttcatttccaaccgcttcattattcacaaatacaccttgtgttgctatccttacaggtttcttcgtgttgtttgtgatttgaaatgtaacagttatatccgtggtcagattaactccctgtctcatggtgtaacgttttattttgtcgtagaaagatgggttgaatgtgatgatgatgctgttgttctgtgagtaataaatacttgctgacaagtaaggaattttgccttcttcccctttgcgtaaaagagggatggtggttttccagtatggtcgcaaagtgtctttattatcaaaacaaccgacaggctggagattttggaaactttgaaacaaaatagtggcctcatccagcatggatttttcacatttgttactgtctgttgaaatggttactggtacaacacggacatcagtatcccagaggtcactaacggaaatgatgggcgtgacgaaaatacggcaacttgtcaatacaagtaccataaaaatcaccacaatccatcttctgattccgcgcatcagggacacaattattctccacggtaaaggtgctaacaatgtctacttcagtccaatttaaacatgacaacccaaattatgcagcatccgataagtggcgcttaactatcggtgacctgatattgttatcccgctctgtacacgattttagcataccaggcgtgtattccgagggcatcgatgggccttcgcccggttcagtgctcaacacgatcccttctgaacgtttaacatatgatcccatcgtatttacgttcgttatcgatgaggattgggtaaactgggaaaccatctacaactggatagccagcaacgccgccgctgatatggctgttagcaaagacatcaccatagaattactcaacaacatgaaccgcccggttggcctgcaacttctgttggaagaagcacgtccaactgcattggacaacgttcttgttgatgtggacgcttctgttccccaattagttacaacggtgactttcaagtatctgaaactgacaccgacccgtgttgtccgcgaaattgataaagaatgagttataatagagagagttgaaaaggtgggaatattttatggaagttaacaacactcaatatcaaacgatgtctatagaggacatcatggctgaactggatccactgattacggttgatccagctgatcgtaatttagatcagatttcgttgaagatcgggcgttcctttatgacagtgcagcggcattacattcgtgaagggcgttatctggaatatctgactgggcggtttaaacagattgatgtttatctgcggagatattatgccggggaattgcctgcacaatcgtatcgcgaacgccctctcaacaacaaaccactgaaaactgatctgcctctatgggttcaggccgacgatatgtatatcgagatgtcaggtctcctccaagagcagaaggcaaaggtgaaattcatcgaaagttgtttggatcgtttgaacaagctgggttatgaagtcaaaaacgccatagattggcggaaatacatggacggtatgtagtgatgagccaactccaggtactcaagaagatcaacaatattgaggaacgtcaatatacatttcagcagtacgaattaccgtacaaggagctgacttgtgtaacgaacgagaatggacgccattacgtttccccaacaggggtgaagttgacctctgtaacaacaatgttggggcgtaccagtgaccatacatggttggatgcctgggtcgaaaggcttggagttgaacaagcagcaattgaagcacaaagatgcgctgataggggagaggcagtgcatcttgcttgtgagttatatctgaagaatgcgccgatgaaagatgttgtggccgccgccggacaatatctgttcatgttcatgcaattgtttccctatctgaatcgcatgacaaagatatatgctcaggaaatacctctatatagcgaagtattgggcttggccgggcgtgtggatttaatcggggtgtacaacggaaccccagcaattatcgacttcaagacttccaatactctgaaaaccagggacatgatagaggattacagcatccaattgtgtctgtattcagttatgtttcaacagatgtttaatgtcaaaatcgagcgtctcatcaacatcatatccaatgagaatggtttactgccgacagtaatagaattccacagaaaagatattctcccaaaaatgttcgagcgtgtccgtttatatcaccgtatggacaaggaacagaatggaatctgggcagaccgctaaatactccatataattgggaggattggtatggccgacatttctgtgaccaaagtgaacgaagtccgtatgcgtgtgcatgctgacgctgggatctatgaagaactgaatgattacttcaaatttgaagatcccaactttcagcctaatcctttcagcaaatgggatggcgtcgtccgcctatttaccaaatcttccggcctgatcgacatcggtcttctgtttgaactcttcaaattttgtaagaccaacggttattcacttgacgtggatcctgcattgaaatatatccaggacatccctgataatgaaatccatgatttctgtaataatttgaaaacacaaattcgcacagaatctggggaatacattgatgctgaagttcggcagtatcaattcgattccatcgccactgctatgaggcaatctcgctgcgtccttgagctggctacaagtgccggtaaatcctttattctttatgtgatggcccgttactacagggaaaggcgagaagcgctcgaaagtaatctgaggacgcttatcgttgttccttcggtacaccttgtaaggcaattgtacgagaacttcgaagaatacagtcatggacaatcctggaacccgttctaccaggtacaaaccatatgcgaaggcgcaacccgcaatattgataaacccatcacaatttccacatggcaaggcatacaagaccagccaaaggattggtttcatcagtttggcgatatcattgttgacgaagttcatacttcaaagtcagataaactttcttatatcctcaataactgtataaatgcagaccaacgccttggggtgactggtactttggcgaatactaaagttgctggtttacaggtagtatctcactttggtgcctatcacaagatcatcacggctcgagaactgatcagtatgggatatgcagctgacattaaaatccggatgatagaattgaaacacagattggccgacgctattgatatgcatggtgccgattaccagaaagaaatggaatatttgatatcgaacgaagttagaaaccggcttatcgccaagatggctttaacattgaagggtaacgtcgccatcatgttcgaacgtattgatgcccacatgatgatcgtgtatgacatcctcaaagaaataaagcccaacgtatttgtcatcaacggggaagtcaaatcagcagaccgcatgcaaatccaaagggcgatagaagaaggtgaggatattactctgttggcatcttatggaacgatgcaacaaggggtttctataaagaaacttcaccatctggtattggcacacccaagcaaatcatatattcgtgttatccagactctgggaagattgatgcgtcagcactcaacaaaagacgtggcactcatatgggatttggtagacaatttgagttataatgggagttacaatcatgcgttgcgtcactctcacgagcgatacaaattctatttgacagagcgccaccctgtagaattgaaaagagtggcgctggaagattatttggggtcttgatccacataggcgggcgttggctcgccttcttcactcgccgcgccgaggaaaatatcgatgctgtggctacatttttccaataattccggtttaatggcatcgtttatcgtcgtttggttggactctgtgaacgggaataactttagttcacaaactgagcttatgttgacgacagcgacatagaggccagatttgatgtttttgtccaacatagaaaatggaatattttgaataccatcttctttgttagtttcatctaccaacacctttaataatataggcgtttttgtgtcacatccctgcaatactttgtttcgtcctgcgcctacggcatagattgctactagttgtttcatgctattcatctcgtgttgtttacatccttatataatagtctcatgttatgtttagaccaatttaaaataatttgcctttcggattaaaaagtcctttcttgttgaacaaatccgtcgtactatacgagttgtgagctttgcgagcaacgagtattaggggtttacgagcgaagcgagttgattaatataaattaatagattaatctatttcgttaataatttgcgcgtgaagagatttaacacttgttctatatccccaaatgggcgatactaaattgcgtcaacaacatgacttgacttcactatatcttgaggatacataaatgcaagaaattactctgtcggaacgcactctgcaacttctggctaactttgaaaccatctgtccgtctatcgtcctgacccctggcaaaaagctgcgtaccgtaaatgacgcatcgacggttatcgccatcgccgatattgacgaagacttcccgttcgaattcccgatcctcgacctgaccaagctgctggccatccagcgcctgccgagtttcaagagcggtaagatcgaaatgtacgaagatcacgtgctgctcaaaggcgaaaactctcaactgcaattctggcgctcggccaaagaactgacgactgttccggctgataccatcgatctgccgtcggttgatttcgaagcaaccgtatcgccggaaaaaatgaaagagctgatccgcgcgtgttctaccctgggccacaaaactgttcgcatggtcgccagcggcggcaaaacccgtctggtgggtactactccggcaatcgacaattccaacgattacaccgttgaattgggcgaaactgcgctgggtgatttctccatgccgatcgacgttgtcaacctgaaaatgatcgaaggcaactatactatccgcgcctgcactgaaatgcagctggtcaatttccaatcggtcgacggcaccatcaactattacgtcggcatgcagctggaataatcttcaatatctgtctgttgctttaatatcgttgcaggggcggaagcccctgtattttgaaacgcatcatctaaagaggctgtaatgtctaatatcacaatcgttggtgaccaatacgcatgggaaaacaaatatcgtccggataatctggatgagatcgtactccctcgggacgtccgtgccaagatccatggctatatcactggtggtaatggcaacatcccgtcaatgctgttctactcaccgaaaccgggtactggtaagaccacgactgctctggctgtttgtaatgagatcggctgcgtcaagccgctgatgatcaacgcatccctggacaacaacatcgataccatccgcgacaaagttatccagtattcgactggcgtcagcgtatatggcggacggaaagtcgttatcctggatgaagccgagcgcctgtctatggccgcccaggaatcgttgaaaggtattatcgagaaggtgagcaaaaactgctcgtttatcctcaccaccaactccaaatcccgtctgaacgaaccgctggtttcccgctgccgtgaaatcgacttcatctggaccgacaaagaagcacatgaagtgcagctacagttcatgcggcgctgtgctgaaatccttgctgctgaaaacgtcgaagtcgatctgaaagtcctcggccggatcattcctcagttcttcccggataaccgtaagatcatgggcatcttgcaagacaatgcctccacctacggaaaaattgatgaacgcgctttggccgtcgtcaacgcaggcggtatgcgccagctggttgaagagatgaagcgtaacaactgggacggcgttcgccaatgggtgaccgataatcagaactacatcggcgatgatttctattcccgtttcttccatttctgtgtgccgcaggataaggacaagccacgggctatcgaaacgactagcatcgtcgatatggtcgctctgtgtggtcaggcgcaaatagagcaccgccaagctggagatgtatggctccatgcggtttacttcctgaccaacgtcatgctcaacattaagtggagctgattatggccgctccgtctttgttcgatttcctgggtgcgttgaacaacaccaaagagaacctcttgcaaacggacgaccctgatgttcgtaaggcttttgatccgtttatgacccggcgcgggctggcacagaacaaagatactcttgtcatcgcccagcgaatgaatttgcttcacaaggtcacgccatggatgcaatggaatatggcattccattctatcccggcgcgcaagcggtatgggaagtgggccaaaaaaggtccgctcgaccctgatattcagatgttgtctgagtattattacatcagccatgaaaaggcatcagagtatctcaaatttcttccaaaagaagcactggccgagatcaggaagaaagttgagttgtctaacagcaacgagaaagcgaagccgcgcaaggctaagtagttaaaatcattaatgaaggagtttggtcatggcgcgcaatacgctcgacatcttaaaactgactgcggtcgacgatgaggccagcatcgtcgattgtatggtcgaagttgaattgaaccaagataaaccggggattttcctgggtatcaaggaaacactgagccgaatcggggttaatactcgccaagagcctgaaaccctgtaccaaacctgccatatcctccacaaatctggcaagtattttatcgtccatttcaagcatctgtttatgctggatgggcattacaacggctttcagcgtgaagatgtcctgcgtatgaatcgcatcattcgtcttctggagcagtggaagatgattaaggttctgcatccggaacaagtaaccgaatgcgccgacatgtcccgtatcaaagttgtgaaacacgatcagatcgctgattggaaactggttcccaaatatatcattcgcccatctcgggccaaaagcgaataactggagtcgctatattatgacaactacatttagtaagaacgtgagactgaatctggcttttggtaatgctaaaggggacgtaaccgcccccgactttagcaaaattcgcaatcaggcgaaactcgttctggaagaaacccgcgaactcctggaagcggcgtatttcgatcatcaagtagttctgacattggaacttaatcctcgggaaagtgaaacgccgaccactactgaagatctgatgaaagccatcatggatgcgcagggtgatatcaccacagtcaacgacggcgtagctcatattgccggtttcgacggtgatgaatgcctgcagcgcgtatttgcttccaacatgagcaagttcatccgttctgaagatgaagtcggcccggcgctggactactactattcccgtggtttcccggaaggccagctgcgcgttgaaggcgaattcccccaggcatgcatcaaggttaatgaaaccgtgatgtggaaaggtaaagaatatccggctggcaaattcctgaagaacatggcggtcttccaggaaccggatttcagtgacatgttgacggatagccccaaacaacagatcaaaaccatcatttctagccaaacagcacaaaagggacaggtttttgtagaccataaaacaggcgttgcttattttcatactgatgatctgggtactttcctgggtgagcaaactgttggtgctatcgaaaatgttgttgatatgcaaggccagacagaaagttatgttccggtctaccaagttggtggcgaaaaatatccggctctcgcgggcgtttgggcggcgaatgtccgtatgtttgtgtattccccgtacaatccggaagtcacccagctgacccgaatcgattaaggctctcagcgtttcaatatacaacagaggctataatggcctctgttttcgtattctaagaagaggataccatgaaagataaacagtcagacatccaatattgtggtgtccgtgaagataaaatcaaatcagctgaaccaattctcagcccctttcatcgtaagctgtcgtatgaatggatgagcgaacgttacaaaatccacgtaagaaaggacgtccagcgccttccttctccctggacagaaaacgagatactacggcaggtcaagttctgtaacgtccggagagagcacgacaggcagtctcagcacctcatccggaatatcgtcgagaacaacaacctgtctctggccgacaagatgttcaactgccttctgttccgtatgttcaacatgtgggatcccatccagcatgttctggaaggcccggtctccatcaatgatttccgtaatatcaatttggaccgaactcgtgaacggtttgcggactttgataaaaaaggcggcgtgacattcaccaatgctttcaacacaggcggtctaaagcaatgtctggccttccctgaactggccgtaacaggtaagcccgccagccccagcaaaatgatggtgaaagtttatcgccgggggataggtgttgttgacgtccttccttacaaggtcgcaaaacaaatggtggaagatcatccgggtgaatacagcatcgaagggtgggaaccgcatatggggatgcgcgttgtccggttcctgaaatcgtttgttacccataaccctcatttcttccattcgttgttggggttcaattcaccgctatctgtttatgaagaattacgcgataaagtagaaggcctcggaccattcttggcatatcaggtttgggttgacttcacgtacaatccggattatccgtttagtgaaaaccatttcactatcgccgggccggggtgccgcgccgggattgatctgttgttcctggacaaagatggtatgacccacgaagagtgtatcttctggctccgtgataaccaggatcaagtctacgggcaatatggttatgttcgtgaacaattctggtcggctgaagcaccggaagatcaatgcatgaacgtcatgcagctggaaaatatgttctgtgaactgagcaaatatacccgttgtgtcgaggcggtcatgcgtggtgagaagcctcgtggtaaggttggatatgacggaagcggcgattataaaaagcgttgcgacgaagttgttctcaaccgtagttctgtcaatcttctggaaaggatgaagaaatgagttggaaattattcaagttacgcaaagccacagatgaattcctactggaagctcgtatgcaaggtcgtcttgtgtacacgccttatccaggaaccacgcgcttttgcaatacgttaagaaaacagaattctgtttctggtcctagaagattgatgaaccagggaatgttggcatacaactctggggatacccggccttgtgacggcgggaagataatctgagccaatatgatactggaataaagttttcaataactgtaatcggggtatattgacctcactttaacgaagcgcctcaaccggggcgcacatttgaactgaaacaggaagactatatcatgtcagattttaaacccttcgcagttgctgtaaagaatcaaatcaccgcgatgtccagcaatggcctgtacatgacttcggttgacaaagacgccctgtgggatctgtacctgtcatctttcccggaaggcaccaacaacatctaccgcgagcgtactgagcacgattgcacctgctgcaagcaattcatccgtaacatcggcggcgtcgtatcgattgacgctgatctgaacctggttactgtgtgggacagcgtcaatctgggtaacgaatacgacgtggtggcggcagcgctggccaaatatgtcaagcagcacaacatcgtcggcgtctacttcaacgattcggctaaggtgagcgtagaaagcaaccacgaaatgggcgctggcggtgtagtgcgcacgtacaaccatttccacgccgttctgaacaataaattcgtcctgcgcggcgaagatatcgcctccaccaaaggcgaaatttcccaatccattgaagtgtttgagcgcagcatgcgtgagctgactatggaatcggctgaaatcgtcctggaactgatcgatcagaattctctgtatcgcggcgaagagcatcgttcggctgtgcaaagttttgtacagagcaaaaccgaatacatgaaaattcgctccgatctgaaacaactttgggcctggcgaactggttggttgtccaaaaaccataaaccgttcggcatccgtaatactgtcatcggcaccctgctgaccgatctttccgacggcgttgaaatggaaaaggcggtgaaatcctttgaagccaaagtcgccccgaccaactaccgccgcccgactgccctggtcaccaaaggtatgatcgaaaaggcgcagaaaacggttgccgaactcggcctgactgaatctttgggtcgccgctatgcgaagtatgaagacctgacgatcaacaacgtgctgttcgccgatatcgatgcgcggaaagctatggatccgttcgatcaactggcgcaggaagtcaaagtgactgaaaagtcgctgggtaaaatcgaagagatcagcgtcgatgatttcatcaaaaacgttatcccgaaagcgcgttccatggaagtgatgtttgaaggccgtcatactgccaacctgatgtctctggtcgctccggaaactcaaggcgctccgggcctgttcaaatggggtaataatttctcctggtcctacaacggtgaagttgctgattccatcaaagagcgcgtgaaagccgctggcggtaacgttgattcattcctgcgcatttcgctggcctggttcaacaatgacgacctggacctgcacatgtacactccgacgaacgagcacatttatttctctcgcggttgccgccgttcttaccatactggcggtgagttggatattgacatgaacggtatggatgggatcaacaaagagcgtaaaccggttgagaacatcttcttcaaagataagaacatgctgcgtgatggcgtgtaccgtttcatcgtcgacaactatgcccagcgtgaaaccatcgacaccgggttcatcgttgaggtggaatatgaaggtgacctgaaacgtttctcctgtgaaaaaggtctgaagaataaacagcagatgaccgtcattgaactgcgcgtcaaagacaaaaaggttgttgaaattcagtcttccctggtgccgacaactggcgtggaaactgaaatttggggtatccgtacccagaatttccagaaggtgcaactggtcctgaattctccgaaccactgggacggtgaacagaccgggaaccgccacctgttctttatcctggaaggttgtatcaacccggccagcactcgcggcttctacaatgaatatctgaagccggaattggcaccgcatggtaaggtttttgaaatgttgggcgctaaaatgagagcagaaccgagtgataagcaactcagcggtctgggcttctcttctactcagcgcaattatgttctggtgaaggtaagcggttcatttaatcgtgtagtcaaagtcgtcttttaagttaaaatataaccgaattcaattgaggatacaaaaatgtttgataaagcaacccgtctgaaactgcgtttcaactccaacaaaggccagctgtccgttgagcaggtgtgggatctgagcctgactgctctgaacgaaatggcgaaaggtctgagtcgcgaactgaaagccgctgcggtcgacgatgaagatttcatcggcaacaatacatccgtcgactctcagctgcagctgcgctttgacatcgtcaaaagcatcatcagcaccaagctgaaagagcgcgatgacagcctgtccgctgcagaaaaacgtgagcacaaccaggttatcctggaactcatcaagaagaaacagcaggaagagctggcgggtaaatctgttgaagaactgcaagccctgctgaaataaatccgtcaactccggtcttagaaaccccgccctgtgcggggtttcaatttgtgtatcgcagtataatacatatgtaaactaaactatggggctacgttatgtttcgtttgagattgaacgaccaagatgtgttctacaaacacttcacctttccaggcggtgaggaacatatcaagattcaaaaggcgggtatccctgttggtaaaatccagacagtggtaattgacgcccacattaaatcgtcagcagacttcattgagctggcactgttggtgaacgccgtgcgcggcctgggtaatgtcgaccgactgacaacatttcatgcttatatcccttattttccatatgcccgccaggatcgtcattgcgactttggtgaacctctttcggtgaagtgggcagcagagttcatcaatagtatgaactttgaccgtgtggcgatcaaagaccctcacagccatgttgtgtcttctctgatcaacaacgtccatgttgtcccgcaagattacattgctcgccagtacctgggatggttcattcggggcaacaacgctgtgttggtagctcccgatggcggcgcggcgaagaagactgaaaccctcagcctatcgctggatggcgttcctgttgtctacggacataagaaccgcgacaccaagacaggcgagatcattggggtgagtattacaaaccctgaactgatcagagaccgctatctggttgtggttgatgatatctgtgacggcgggcgaacgtttgttgagctgggcaaagagcttcagaagcacgagcctaagcacatgaccctcttcgttacccacggcattttcagcaaaggcctctctgtgttcgacgggatctacgatgctgtgtatgccgacactgtctggtgggagaacatcaccgccgacggtcttccattcaaaactgaaaatacaggacgtgtaaaatgagcatgcgccacttagatccaatccatgcaatcgacttctacaaatcagggcacatctatcaattccctgaaggtagcgagctggtgttctccaacggaactccacgctccaacaaactgttcaactcccacctgccgaagaacggcgtggtggtctggggtatccagggattcatgacctggttccacgaactgtttgatgaagcgttcttccagcgcccaaaggccaaggtgctgaagaagtatgcccgtcgaatgaacaaagttctcggaccaggccgcgttgggacagagcatatcgaagccctgcacgacctcggctacctgcctattgaagtccgtgctctgcccgaaggcaccatgtgcccgtatggtgttccggtatatgtgatgttcaacaccttgccggagttctactggctgaccaactatctggagacggtgttcagttctgagatctggaagccgatgacgaacgccaccattgccctgcactacaaagcactgatggtgaaagccgctatcgctacaggcgtgtcgccggaccattggttcatcgactaccaaggccacgacttctccttccgtggtatgagcgggtggcatgacgcggcgtcttccggttctggccatctggtgttcttcaaaggcaccgacaccaaccctgccctggacttcgttgaagagtattatggcgcggatatcgatgaagactatgtcgttgctggctctgttgcagccaccgaacacgccgtgatgtgcatgggcacgaaagatggcgaattcgaaaccttcgagcgcctgatttctaaagtctatccggacgggattgtcagtatcgtttctgatgcatgggattactggcaggtcatcgacgactatctgccgcgcctcaaagatatcatcatggcgcgtaatggcaaagttgtgatccgccccgactctggtgacccggtgcatatcgtcggtggttatcgcgtcgaagaattttgcaatgagcaggatttttacgataacgacccacgtgaagaaactgaagttatctatctcaaagaagaaaacagataccatattctggaacaatatcagtttaatcagatcggggaagagatttctcgttcagaagcggtcggttctatccagcgcctatgggagatctttggcggaacccagaccgaaacgggccacttcctgttggatgagcacatcggcctgatctacggtgactccattaccctgagccgtgaagatcagatctttgctcgtctggctgaacggaatttcgcttccatcaacgtagtgttcggtatcggttcctatacttaccagatgaacacccgtgatagtaccgggacggcggtgaaagcaacggctgggaaggtcaacggtgaattccgtgagattttcaaagaaccgaagactgacaaaggtggtacgaagaaatctgcgcgtggtttccttaaagtcattaaagactctcagggtaaactagtgttggttgatggtatcacgtttgaccaggtgcaagacgcagataatcagcaccaactggtttaccgtgatggcaagttcttcaatactcagactctggaagatgcgcgcgttcgtgccgctcctctggtggaagaattggcatctcaaatatgttgaagaactgcaagccctgctgaatagccagctgccttcggcgcgataatgaaccccgccatgtgcggggtttattttaggtgaagaatatgaaaccagttatttgtgattattgtgggaaggctgctatactcgttagtggcgacgcaatatacccccaccgcccggatcttaaccaccttcaattctgggcttgtgagccttgcgatgcaagagtcggttgccatcctaacacagggggcattcccctcgggagcctggctaatgccgaattgcgcaaagcgagaaacaaggcgcataactgttttgatcctctttggagagaaggtggtatgagccgtggacaggcataccaatggctgtctgaacaactcggtctaccgaagtccaaatgtcatataggacaattcgatatccacacgtgcacaaaagtcgttggcttgtgcagcctttattggagtatgtaaatgtctaacagaactggtattaaactcaatccagaaatccttaaatcccatatcgcggaagttatctatgaagaccgcgaagtgggagggcatcgtgttatcacttgccatttgaaaatggataacggatttgtcgtttggggaaaggatagctcaacatcgattgaccccaaaaatttcgatgaagaattgggcaagaaattggcatacgataagactttctctcaattgtgggaactggaagcataccgggctatggttgtccaagatttcattggtaagacaactgaagaaccgtttataaaacttgaagattatattgaagaaagtaagacaattcaagtatccggtggtttggactatcggaagggtgtagccaccgcatattctattagatcaattaaaagaagtaaatttggattgttggattacatcagcatttgtctttacaaaactgataataaaaaacatgatgatatcaataattcgaaagaaatacagaaagcaaaggatttcatcagatcttatatgaatcacactgaaattaatagtcagtttgtaattcatatcgcaaaactttgttgggccgctcggtcagcggttgtggacactacaccttcttgggaagattctaaagaaacagatcgccaagatatgtgcgaaacggttaaaaaattactgttatcccccagcgattatcaaccaaaagataatttgttgaaattgttttgggtgattgtgtcccaattccgataacaaaaccgggttcaatatacgttcgggcatataatatcctatcgttaaacagtggagaagatttatgtcggtcaaaatgaaaggtgccgagtttaaagcatactacgatgactcacagtattgggttcaggatgcttggcatgattatcacaacataaaggttaatggtgaatatattgaagatattgaaactgagaatattcccgacgacgctgatttggttattgagtcggggatagtttatattcccatcagaagtgaatccggttatgaagaaaaagaagtccaactggtcactcacttcaagaactggcgcaaacagcaaaaattttctactattgttgtggtagttgaaaaagacaaagctgaagaaattatagcctcaattaaaacgatacctggcgtcaataccgtcaagtgaggcgataatggattcctgtctattagatcccgagaacgttcttgtggttgaaattgaaaacaacaagccgttcattttgaaaatgttggagaaggataataatcctgaaaccaattctaaactatcccaaaaggggaataacgatgattgaatcattagaatttaagaatgccacacagacggttgctccttccaatcacgtcatcgtcgttgacatttcttattccatgtgctatgcgctgccgaaactgcgccagcacctgaaagaaaacctgccctccctggttaagccggaagacaccatcagtattctgtacttctcttctcgtggcgacttcggtactgtgttcgctgggcgccaggtcaccaacgcatctgacctgagtgagctgggcaaactgatcgatcgcttcctgcaaccgacgggctgcaccggatttgttgagccgctcaagctggctatcgaaaccgccaacgatctgaaaaagtccggcgtcatcaattccctggtgttcatgaccgacggctatgacaactgctggcgttccagtgaaatcctggccgttgctgagcagctgccaaaggcgtacgacaacatcaccctgatcgaatacggctggaactgcaaccgggaactgctgcagaaaatggcagagtgctctggtgccacccatgtattcgccgaaggccaggaagaatatcagaccgaactggaaacagcgatggtttctgtcgccccgcgcgttcgcgttgatttcagcgtcatctattcctatgccgtttatatcgaaaacgggattccgaccatcctggccgcccagtctgatgaagaccatcctatcaattacgtcaacatccctgagagcgtctctaagctgtgggttgttgatcctgatatgatcgaccaactggataacctggcggacgttgaagcggcatatgtgctggctctctttggcgtgcatactatggatgccgacctggtgtgggccgcgctgaaaaagactggcgatgtgcgcttcattaaacagtacaccaactgcttcaccaagcaggattattccaacatcaaaactgacatcacagcagcgattgtagacccggcgctgcgcggtgtggacggtatcgattacaatctggtgccgccggaagacgcaactactgttgttgatgttctgacttacctggcgggagcagatgcgcaactggttgttgaccatcccctgttctcttacaagcggatcggtcgcggtacggtacaaaaagccgacgataccgaagacaagctggcggcagaaattgccgaagccaaatctaaagaagagcgtaaagcgctggccctgaaactggctgagcacgaagactggactcctgtgtttgagccggtgaaaggcgcgggcgttcctatcagtaatctggtttacaactcggcccgcccgaacatcagtctgcagactgtgcaaaacgggactgtcattattccgaagttcgcacaaaagaaatacgacctgccggaatctattgacacatggcagtggaagaactacaccatcgtcaaagacggtatcatccatatgaagacccttcctgtggtctgctcggctgaaaccgtatctgaactggttagcaaaggcgttgaagtttacggcggcccggaagtgttcatcgtaaatctgggcagcgttcctctggttaaccgcgcgatggttaagaacatcagcgctgcgcagttctttgctgaccatgtccgtctggaatccctgaaagccaagcagaaggttctcaaatatttccgtgacgaactggttgggaaaggtaatgccgtgggcctggcaggcaaatacggtgccgaagcggctgagtttctgtctgcgaatggcatccgcgattacggcttctctccgaagaccgcttcggttgagtctactgatttctacatgagccgcgaactcaatgtgaagatcaaaggcgcttcctcgctgccgtcaattgccgccgttctgaagaaacaggcagacaacaaaaagctgaacgcagctgatcagctgatcgctaatgcgctggcagaatacaacgcctttgtcaaatctccggcggtgactgcagtcccagaagcaacgcagaccaagatcattgaatcttggatcagtgacgctgccaaggccgcaatcacccaagtgcgtgagctgaacaagaccctgtccaaatccctgtatgctatcgttgctggccatggctggttcaccgacctggatctggaagagtccaccatggaagtggaagttgacggcgtgaaatacaccgtcagcgcagtcctggaagagaaagagatcaaaatctaatcaactgtgccggggaaacccggccttttcataaggtatcccaaatgtctaagaatgtgtcttatatcgatgtcatgcgcttccttgtccagtatgcaagcgacaatctgaatatggaattatggcgtgagaagaaacactccgtaacaatacaatccgcgattgaaaaaatcgaagatcagctggataccctggctcctctgcgcgtcaaagaacatctgggcggcgatgaacttgacgcgatagaaatcatcatggaactggaagaagaatatgatgtagagatcacggatcattggatcgggtctcaccaagacgacccaactctaggtgaattggctgaacacgtggttcacctattaaaataattttgaagttggctttacttcttcaataaatgatttaatattaattttgtagggcgggaacggctcccgcctgattgaagaaggtgctatattatggaacaactactccccgaatccgtatgcacatacgttcgccttgcaagtgaaggtgacgaaatggccacccaactcactgacctcatcctgagctacggtatcaagaaagtcaaccaagttgataactctggtgtgaaaggcgactatatcgttctgaaccaccgcggtctaaagaccaatccggtatttttcgtcggcgttcataagaaagatggccaggaagtcgtggagatcgtatcgtgagtaataagaaagtagaaaccacggttgaaattgaaaagaattggggtttcctgcgtgctaaaggtttccgccgtgtgtatgctgcgaaggaagtctatgtccagcgtaaggacgttatcattagcaagaagggtaagtcctgggtagcagaagaagtagacgaagacggcatcgtaggcaagattaaggccaaggccgaaatcctctttgctcttctgaagcaaatcaactaaaatcaataacacggacggggtatgatagccccgtcaatttgaagagactatatcatgaaaaagttaatcattgctttggctctggccagcctttccttcgctgcacaagccgatcgtgtcatcaagggtataaccactgatggcaaatactccttccaggcatttggttctgaccttgtcctttataatggtgcaaagcggctgtatcattgccgttacgacatgaccactcgcgggattgataaagcagaagatccatatgtgctggacatataccagtgtgggaataaaactctgggtgtcaaaaccttcgggaatatcgaagaaggtggttgggtaacggtagtcgcgaccgtcaacaataaacctgtcactgtattccaagagtcatttgccatattcaccggggcgaattcattgtgatcaaagaaggggctgtaaaatgattattaattgggaattagtcggattggtgctcagcattattttcggtgtggtgggtgtagtttgggtaatcattggcatctggttctatcgtttattcaccaaatatgagaaacgtgatgctgaacgcatgaaacgccaagaacaaatccgcaaccgccgggagaactggtggtgatggtcacaataattgggtatgggattattgggttagtcctattcttgatcattatctgtttcactaaacatatgcgctaactaagggataactccatatcccgaggtgtgccatgttcttgacttcctttatcgactggttgaatatcatcaacggcctgaggattcctgtagggaacctcgggctttctcgttcttctatgccacaaattgacgctgataaacagcaagacttccatgattatctggaggcgaatggcgtgaccatagatgcatctcaagtcccgatccggacattacggctgactcagaacgagatcaacaaaatgaaggtctggaagatcatgaagcagatcaggaacaagaagccgatgggcagggtttgggtatcttcagacaattacgtcgtggatggttcccatcggttcgttgccgctctgaatatggacggcaagcagcgtatgaaggtttacaaagtagatttgcctgctatggaatttgtgaaattggccaggcagttcaatggtgtgcgttacagaacagtttcagattcgagatactaaaatggatttttatttggaacttgtaagcatcggggcgaaaccgcatttcgtcaagaaatatctttcgctcctttcttcatttaatgattatcgcggtgatggtgagaaacaccatatattaccagtatcgttgtttccagagtacgctaaatccagtttcaatatagttaaattgccttatagggttcattatattgttcatttatgtttggcgcttgcattacctggaacttctatggtcaacgcagttatgatattaagacgcgccgacaggaaggttaattctcatttattcgcaaagatgcggaagaaatttgcacaaagactttctgaaacaaataggggtgaaaataaccccatgtatggtacaaagaggtctaatgtggcgaaggaaatgacttctacatctcttttaaagttttatgaagagaaaaggaagagcgatcccgatcttaaaatgttcttttctgaaagaaattctaaagtaaaacggggtagggaacatcattgttatggtaacagattaactaatcaacttactacagagcaagaaagaaaacgagtagaatcatttaccagggcttcccgagaaaagatgccttgggagaaacctagatggaaaccagaaagagatcaatggtggtgttgggctgctcatatacactattatctgataacaggtaaaagtagaggcgaagccctaaaggaagtgtttggttctaatgatgccgaaatttggtcacaagttagacccatcatgcttagattagacagtggatgggatccgttaacttgccataaatggttgaatagatacggaattgaattccagtgaaagtttctgaataaagaatattattgaaatcctttactcaataaaccttccgaactactatttcctcaatgaacaagagggaatcaccatgaaacgtttaatccttggggtgctgctggctggactggcgctccccgccgctgccaaactgaactccacaggtgagaaactgtgggaagatctttcttactgtgctggatggtctcaggctgtcgccatagacaagactggttctatcgagaacttttctgaattgtggaacacaggcaacgtatctgacgctgttgtcaacgccggaattgaatttaatcgatataaacaaggagcctataatctcaaaggctacctgaatgacgataaattcaacaaaggtgggatggatgcctcagatttgatcatgactgggcgtatgggtacggcaggacggattcaggttagacaatgccgttcgcttcccatcccggcgcttcagaaaggtgtcaacatcgggcgtcgccatcttgatctcattaatgatgggaaccagtgcgtcaaagtatttgaatacagtgccgatcagatcaatgatcctaaattgaagaaagaatggcggactcgtgctcttgggcttcgggcctggctggtagagaatgaccattattaccaggacagggttgattcaggcctcaaagatttatcgaccaatttgtctgtgaatctggatgacccacgactgtcccgggaacttcagcagacacgtattgattgtgacaacatgatgaaggagaacgaatgatgcgtgcgaaaaagtcgactatcataatcttctacctggcattcgttgcagtctttgtggtctgggcaagcaatgcgttggcagtcccggcgaacaatctgaacaaatgcgctgcatggctgtcaacgtatcaacagttccatcctgacgataaagatacttctattttgctttccgattttgaaggtgaaatgaaacgtttggaccagtacagtactgaccagattgagaatgctctggatttaccaatgatggattccgcagcagataacagtcaccaaactgctgtaaacctgtcatattgccgtgagattgcgattaactttacccgtaatcaaaaataaaatcgggttaaaatttaggctctaattgaaaatgaccggagtactttaaatgaccgacaacgaaattgcccagatcattaagcagcattcccgttttgctccggatgctgctaatgtcatcatgctacacaaagacggacgtgtattctttgctgaaaaatttgagcaagggagccagttctgggatgcgagcacgatgcttccacgtaccctacaaggtatcatctactcctgttctctggtagcgaagcggagcgatgctggtcattgggttagtgttaatgatctcggtggcattatgggtgggaaagaatatccgaccaaacgctccccgccgccttatgtcaaagaacagatgtccaagattaccaatcgtccaagaccgaccccgaaagaaccgaaagtcgaagtcgttcctgcaacggctgtagaaacaaaatcagccaaaaagggtactgattggcgttctgaatttatcgggattaaagaattggattgtgaacgtaatcctcgcaatcatccattgttcgtgtcaatacggactgatggtaaaatcatcctgagcaaaggtcttctggataaaatcgatggtaattttgattttctggtgtctaaggatcggaaggtcattgccctggtgaaaaacggttctatgtataatatgaacaaatcggggaattactctcacaaaggtctgcccaagtatctcaagttcccagaagattccggtacagttcgaatctatatggactgggaccaagaaaagaacgcatttatcggcagtctataatatcggggcggttataatgagcatgctatttgatgtctatctggttcatatcgccgctagtcaatcccaacgttctttcttcgtgctgttgccagcagataaaggtatgggtattgatgacttatctaccctggagcaccagttcttccaacgttggaaagacttgggacaccttgttaatttcaacaaattgactgatgagatcgctgcgcaagaaagtgacggtcttcgacttctttcacggtctgaattacaactaatcaggagtaaacatgagcagccgtatttttgatctaaaattccgcgtttggcacgttcctcaggttcccgggaaaatgtttacagttgaagtcccgacgtatgctgaagctgaacgtttgaaatcggcgctggctgattatgatctgttccagtatgagaacaacatcaagcctgattattgcaataccagcggtattcagatttatcaacacgacctcacagaagaagagatcgaagaaatgggccttgaagatcgttgggtggatatcgaggatgaccaagatctacaggattatctggatcatattcgttctactggttgggaaataaaatcatgaccatgatcagttcttatatcgttcaaaaaggtgatacccttatggggatctgtatgaaattttattcggatccctatatgtattcagatatagcgaagtacaacaatatcattgatccaaacaaaatttgcgtcggccagctgattaaatttccccggcctgtcaatgacccacaaacagtcgttatcccggtagaacccactcagaaatgtttggatgctatcgcaggcttattccaggaaggattttgtgatggtcgtatagaaagagatatttatgccatcatagtgagttcggctctgaaccaataatttattgggaatcggcaaataagtgctttattcaataatttttgttaggtaagctgtaatcctcttgtagtgaacacagaagtaaacatttaacataaaccaactggagtaatccgaatgaatcgtcaagattttatcgcacatatcgcccaaacccagggtgtgaccaaaaccgaagctgaaaaaactgtcgcgtcctttatcgccggtatcaactctgccgtcgctgcgggccaatccgttcaactcgtcgggttcggcaccttcgaagtgaaacatcaggaagcccgcgctggccgcaacccgctgaccggggctgcgctgacaatcgaagcgaaaaatgtcgtcaaattcaaggtcggcgaaactctgaaaaacgtcgccaacggcaaataaaacaaattcggccagtaccaggcgcactgcgcaggcaggtacaaagagaaagccggggattaccccggctttttcgttcttgggattcgggtaaactatactgacacccccaaaggagaaatcaagtgacagcattcaaccagcatgccaaagcgctggatactcttcgcagagaaataccgatagaagaaatccagaaattggccgaacgatattttccatatgaccacgccaaccccggccaaatggaatgtattgttgaagccatagatgctttggtcaataagaaattcaaacacgtgattatcgaagctcctaccggagtcggtaaatccctcattggcacaactatccatcaagtgttacgacaccttgtgcttgaagcaaacccctatggccaattccgtacatccatttccacgccgaccaaaggtctacaagatcagtatgcggctgaaaaggctgttgctatcgatatcctgaaaggcaagaagaattatcgctgccatatgcacccggatatctattacaacgcagtgcaatgccgtatcgcttgccgggatgggcattgtagtaagaggcgttgcccctatgtccaggcacgtaatctctggaccaacatctcttcattacgctgcacaaacgcagccatgatgatagaaatgtgcaccaccatttgtatgaagccagaaaaccgggccgacatgcttattttggatgagtgccataaaatgccctctacactcctagaccatacgatcatggaatacaatacgaaggtattggaaggactgagatcgttgcctcaggggaaggatatcgtccaggcagtggttgagattgtatcccattgcaaagactatgaattgggcaagctgtattcccttgatggttatctgttcgaccgttttgtggacttgttaggaaaggtggaagccattttaacagaactgcatgaactcgttgaatatgaccgcctgaccgaagcccaggtaatgaagctggccgatattatcgacaccctccacaacctatctgactattgtggtatcatgtcacagacccaggcgagtacattcatcgtacaggagaaaggagaagaattcatccgattcaaacccgttatagcatcggatgtgtctgaattcgggcttttccgcaaagccgattatcacgtgcatatgtctgcaaccatctgtggaattgatgcgtatgctcgctccttgggtattcgtcctgggcagtaccataagatacagatagggaacccgatcccgattgagaatcgcaaagtcaattacatgccggttatgaaaatgaccaacaacatgggtgactatgagatgcgtcagctggccgggtttgttgacgagatcatacaattccatcaaggccagtcgggcatcattcatacggtgagttatgaccgggcgctggcgatacagaagttcagcaaataccggaacatcatccacgtacccaggacccgcaaggctctgatggaactgatggataacgctttccgtacgaagacgccttgcatcattgccagcccggctatggaagaaggatatgacttcaaaggggattacagccgtttccagattcttatcaaggtgccatatgattaccttggtgacccattagttgcgcatatcaactctgtggacccatcggcgtatttccggaatgccatactgcgtatcatacaaatgtgtgggcgttcggtcaggggcgtgaacgactgggccgcgacatacatcctggattcttcctttgaatccttgatgatgcgcaacccagagttctttccaacttggtttaccgaggcagtatttgaagtttaataaccagcaataaatgacaggcgacatttgagattcggtgccagggatgtcagggatatgatcatatcatcgctgtccatactgtactcaattgtcgccagttgctgggtttgaacattgttgtattcactgtagatcaggtcctcaccacggaaaccgatttttccatctgtatcttgccaatgaccttgtgttttgtcatacacatggacacggaattctaccatatggaaaagcgctttcggtatacttttcaatatactggtgccgacgaccgggatatcaatatttgaatcattggccccgccttcataaactggcgtccaattgaatataggatcaccaccagcgaccggagtccttttccaatattggaattccgggttccctgaatcgtttttctgcaacaatatgacttcgccacctgtaaaattggtggtgtcaatatcgtctcttgctaaaatatccgccggggagccgataaatttccagccatcacgatccaataatgacttataatagtctgtgaaaacgttgctgtcgccagcattgttgattgcgtctttgagaccttctcctgtgaccatctcattgactttcaaccacatgtttttgaccgcagacgctgctgcaacctggcctggtgtaccgcctgcagtgtagtcatagatgatgtctacattctgtattgcggtctgtatggacaggagaagtcgttcgatttcagctgcggttaaactgaaacgataagaacgttcagccataataatgtcctcatgataaacaagtttggagtatttatatcgtgattgaaatttacactgacggcgcttcatcgccacagaccacacaagcggcgggatgggcctttgcagtcagcccgatttctggcggggcgcaatggaatgtattctatggttatttgccgccgccttctacgaataatatagcagaactcttgggcgttattaatgctctgaaactcctttggaaattttcgggttgtggtgagcgtaatattcccaaagcgacgattatatctgacagccagtatgtgatcaatagtgccaccaaatggcgttcgaaatgggaatatgagggcatgcctcccaagaatactgaattgcttcttgatttgttcaatatgtatgacaaagtttgttcaatttgtgaacttgaactaaaatgggtcaaaggtcatgcgggtacaatcggcaacgaaattgcggatcagtggagtgtccgggccaaagaaaatagcagtatggtcctggaaaatgagcgatttcgcgtcaagaaagtcgtcggttcattcaatcaatttatcggtatctctgagggttagatcatgggcatgaatttcgtagacagaggggaaaacgtcaccaaatatttcactgacgaagacaatgagcgtgtcatcgcaatattacgtgactggatacccggaaggaaaaaggcgatagccgaagggaagcccctacccaagatcccaaattatgtggccactaaagtccatatgatcatccagaaaatgagtacccgctacaactacagagattatcctttccgtgaagatatggtgagcgatgccgtcgccaatattcttcgatatttacacaccttcgacgtcagccatgtcggcaagaaagggaagatcaatttcttctcttgggtcaccatgtgtgctgatcgttcattcgcccgcaaattgaccatcgaagaagaacacacatatatcaaattgcgttcgttcgaagacgcgggtggctttgctgcgttcagtgatgatccagacttccagactcagacatttgttgacaacactgggattacaatggattttcgtgagcgcataggccacttcgaaaataagaaagaatcccagcgtgaaaaggaaagacaaaaacaagccgacctcaaagaagacgaaaagaataaaaagattccaaaaggtatacttcaatgtcttcgtggaccacaaaataatactaccgcacaggccgaagatgattcagaacaagacttcggcaaaacccaattcagccttgaagaaataatggatagccctacgctgctatccgaattatcaggagaaaagaataatggcgattgctaagatcggcgatttacatatcgggagccgcaatggctctcgttatgttcgtgacttcattaagaattatctcatcaactatttcattcctgaactcgttgatgccgacatcaaagaagtctggcaattcggtgacacatttgatgtccgcaaattcatgtatgggcgcgacaaagattggctaaaatatgatctggccccggcgttgcgcgctgctggtatcaaatggaatggtctgatcggtaaccatgacattactttggaagagtccaaccgcatcaactggccttcttatttggttgaacttgctcccgatgtgttcacatattactccgaaccgacggaagttatggtcgagggcaaaaaagtcctggtgcttccgtggatcaacaaagagaattatgcgcggtcagtacagatgttgcaagacactgatgcagagttctgttttgctcacctggaactggctggtttcaaaatgtatcagtcctccacttgtgaccatggccagatcgatttggccctgttgagtaagttcactcgtgtagacacagggcactttcacacccgttcgtttgaagggaatgttcagtacctgggaacgccgtatcatctgacatgggaagaccacaaagacggggataaccgtggattctacgtggacgacctgacagaaggtggtgagctgttcatccccaacaacgccagccaaactctattccggtatgtggaatatgattacaccaaactttcatctgatgacgaaggtaattggattgatccggaatggctaaacaccaagttgggtattgaaggacagatcgttaagattatcgtaaccaatcgcgataattctaagcattacgagaagttctgtgatgcgatgaagcgctgtaaatgtattgactacaacttcatcgataagaccgtgaccgtttcggctgaaaaggttgaagtcaccgaagaaatgatcgcgaccgatgccgtggaagttctgaagaatgatatccgcgctgctgacaatatccagcgcccagaatcagtctgtaaactggccgaagcattctatacagccgcccaacaacgtcttaatactctggatgcataacgatgacagatatccttgaaaaatttggcaacctgttaaaagaagctgcgacgccggaagatatcccggttccatttgatgtgcgtggtgatgttacccacaaactcaccttccgtaaggggcgggcgaagaacttccgttctattggtaatgaattcatggaaattgattaccaacgaaacccagcaaccctcgttacatctgatgataatggtgccgggaaatccactatgttggtctggctgttattctttgtcctgtacaacgatacatacagcaagaaagagaagaaggccgggctggtaaactcccagaacaaaaaggactgcgttggcgaagtagaattcgcctgccggggtagtgaatggaaggtccgccgtgggatcaaacccgacttcgttgaagttcatcagctggttgacggggaatggaaacaggttgtaaacgaagcggctaaagccgacatgaacaagtatatcgtcaacctgatcggcatcgaccagaagatgtttgagaactccctggttctgggcaaagagaaattcatcccgttcacggaaatgtatacggctgaccgccgtaccatggtagaagcgatatgggatcttggtttcttcagcctgatgaacgaagacgtcaaggcaaagatcaaggtgctcaacaaaacgttggaagacatttccaatgagtttggtatgaaaatgatcgaccataccaacaaaaagacgcagctggcacagatcattgaatccaataaccgcatccaacaacaatctgccgaaatcctggagcaggaacggatccgactttccagtctggatgcggatatttcttcgtatcaagatgagatggcccggctacaggaagtcgaagtcaacaccaaaaaggaaattggtgaagtagaaagtcgtctcaatcaagaatctattgaagagatagaaaacctaaaggcacaatatgccgagaagatgaaagcagtagatgacattgcatcagataaagctgaagactatgagcgtatagaattgtcttcggctgagcaggcgcttaacgatatccgagaccaagcccgtaaggtcactgaacgcaaaaacgaagtactcaaccagcgcaatgagaatctgaatgttctcaacgaagcgatggaaaggctgcgttacggcgaaggtttcaggatcaaattccaaaccgaaaaagaagggtatcaggaatccattcagaagttccatgatatgggtacttgcccaacttgccaacaagaagtatctgaagaagctaaatcccaggtccaatacgaaggcaacatcaaaattaaagatgtagattcccgtattgaacgactggaaactatgctggaagaaatcaataccaccatagcagagcacaaagcgaaagatgatgaatttgttcgccaagtcgctgaaatcgatgctgagttaagttctctgcgggatcaagcggcagaagcgcagaacggtattgaaacgattaaacgggatattcaagagttctacaaaactgctgaaattgagaaggcttctcttgaccgtgaactcaaatctcaaatcctgtctaaccgccaggcgctgaacaccaggttcgatgacattacggcatcattacaacaaacgttagagacagcctctcagggacgcgcaactgtcaaggataagatcggcgagctgaaagcccgtcgtgcccctctcgttgcttcaattgccgatttggagcgtaaactatccgtacagccgactccaactgccgacctggaagcagtcattgcaggtattgaacaatctctgaaagatctggaagaacggcgtcaaacgacagatgaagaacttcaggatcataatcatcttctccacttcttgaaggatgaccagaccaaggcccgcattatctccttgtacctgccattcttgaataagaagatcaatgaatatctggaagggatgaatatgttcttggacatttctgtggacgatacgtttgatatcaccatgggaaccgccgggcgtaaaggccaaagtctcttcagcttatcttccggccagcgcgtccgtgttaacattgccatcatcatggctctgcgtgacgtcgctaacctgaaagcatctgtccaatgtaacatactggtgtttgacgaagttctggagaacctttctgagcgcggtgtacaagaatgcattgagatgctgaaatacaaattcagcaataataatctcttcgtcatcagtcaacgtgagcaggaattccaggaatacttttctcataacattcgttatgggctgcgaaatggtatgacccaggtgatcagcaaggagtgatcatgaaagtcgtccatttcaagaaggaaccatatgacatctacatcgggagacccggaaaatgggggaacccgtttgaggtcaaagatcatgggcgcggtaattgcatcgaattatttgaagatgatctttaccgacgcttgataaatggagatatcacggaagatgaactccttgaattggacggaaaggtcttaggatgttggtgtaagccgcgcccttgccacggcgacgtttatgtcaaagtggtcaaccgtattaaactattccgattgatgggtaaatcctttgtagagcacttgagacaaacatatgggaaataacatagacgaaatattcgaggcatcaaagattgcatgcgacacctggaatagcaagaacccgaagttccctgtggccatcggtgttatttcataccatcttgaaggatacgtgatatttgttgacgggaaaatcaacttttaccgtgatgggcatgaattcaacggattattcaagatcgggaattacaaaacttcatttgatgaccctatggaactggtgtatgcctggttggaatgcatcgaagaatgctataacgccaaatttgaataatgataaagggcgctaattatctggtgccctttatcttttaaccctgtcaggaggctcaatcgagctgcaagtcgacaaacaaataaggaacgccatcatgacgatgacaacgttgaaggccatggctgctttcgtgacctttaccattgccagcgggagtgtgcacgcttcccaaagtacatcacaatgtgactatgatttttctgagcaacaactatccaccatggcgactgcataccacgtaggcaagtcccaatctcttggttacaccctggcagctatatcctggagagagtcccgtgcgggcgaagacgtcgtgtctatgcgatctggtatcaaagccgccaatatgggagcatttcaaaacaaagttcaaagtgttggggatcgggaaggatgcaagaacagaaagtgctatgccaatgtagctgtgaaacttttgattgatcaggagtatgctgccaacgccgcgctggatgagatgaatttctggatgaaccaacataatcagaatgtacgcaagtctctttcatcgtataatgccgggcacgcacgcaacagcaaatcgaattcgtatgctgccgatgtagtgaagaaggctaaatatctgcaaagatgtgtgtctttcaaaggcattcccgcgagttcgaaagttgatcctcaggtgatagccatgaacaagcgcactatagagaaactcaagaggacgcgataatgaatatcaccccatctcaaacaggttatgagcacctgatggtcttcctggctattcagggagccaaagagggcatcataacttcagaatacagcgggaccgtccgcttgatcgactacacggccagcgaagcatttatcaagaaatgtatcacggcatggaccaaatatgctgttgggacttacccggcccctcctgctggagaactgttatttgtcgtgcctaccctggcgacaaccgatactgacgagatctttgccgatatgctgtccaaaggatatctggcttatgacacacagcatgatatctatgacttctcggccttgaatcgggtgttcggttatacgatcacttctgaagcgaatatcccagattgggggatcctggcttggggtaaagatggccttggggcaacatatgcttcatctgatgttggaccagtccttattgatccgggcgttaccatggaacaataccttgcccaattccctcagcatggtgtaacgggtagcgacatcattatcgtataccctggttctaacgcccttgagcgtcttgtgtccggatgggatccacatctgaaagcggtcgtagaaggtatccggttctacattccggtggtgacccccacgccttaaaataattcaataaaaaggggcttcggcccctttacttattcaataactacccctataattcaatacataagcagtacgatgaaacaaattgaaacgaaggaactacattatgaaaattatcctcgacgcatatatccactacggcaagaaatatctgatggcgaaggtgtacgaaggcgaaaccctggtacacgcccagacccacgaagatgcaaaactccgcgaaattctggcacgtgacttccccggcgttgaagttattgagccgaccaaccaggctgaagttgacaaagagtgggaacgcgaatggagtccggctgcgttggccatcgctgaaaagaactggaacaaccgtgaaaacgccaaccgtccgtttcgccgttgacacaataggggctataatgcccctttcctttcgctaattaatggaaaccgtccgttttattatcaggagaaccaccatgtctacaccgaacttcttagatttcatgaaagagcgcgaccagttggacgaagcgttcaactcagctccttatgaactcaccatgggcaagaaaaatgccggggacgttttcttcaccttcatcgacgaagatgataaagaataccgtatccaattctataccccgcaaggtctgggtaaaaacgtccgccaggtctttatcggacagaaacgtggttcagtttatcctgatgccatcgcccgtttcaagaacccgatgcgcgttatcgccagcatgatcgaagccaccaaacaattcatggcgacgcctctgggtaaaaccatcgatggttatgccgtcaacttctctaagaaagcgctggatcgtggtatgaccctgatcccgaaaatcattcgtcaatccggcctcaaacagaaactgaacgtcatggatcttacctacgcgcctgtccctgaccgtggttatgtttggctggtcaaaaaaggaaaagacccggctcaggtattcgacggtccgaagatgcagggtatcacctgggatgatccagacaaggtcggtgacgtcccggttcagaacaatactccggatgtgggggcttcatcttctgttgatgattccaacggatggaaattaacttcaaacggggatcagcccatgttgatatgggttggtaaggagagaggccgcatgaacacggcaaatatcgctccccactacaatgagccaggcgtgtatgttggcgcatacatgaatgagaaatctgtgcgtgggcaaagtgctgatttcattgctcgtcagttgaaattaccgcaagtccctatcagtatcctgaatgatttcaccacggcgtccacaaaattttggaaaggttctcagcagaagtccgcgccagctgactccaacaccactattggtgctcggggtgtgggaaccggggctggttcttctgaaatcgaagtcaaccgcgagtggtacaacagctcggacactggtctggagttgaagagcgggcgcgacccgattcgtggaaactacgtccgcctgataagcggttcgaaagaagtagccgtattctatggttataattttgacaaatatccagacgggactgaggtatcttggaatatgaagcgcggcttcaccaaccaagacttggtcggtgcgtccatgaccaaacagaagaaaggcatgtacgatcagtacactttcaagaaaggtgctcaaataattctggtggtggacgttgacaccagcaatgacaccggcaataacaccagcgatgaacttaccaaatccaagtggctcaatttactgaattacattggctacagtaaggcagctggcggcaaattatttggtgatgatgaatacatcaagaacttcgtgaaagaccgttacaaactgactctgtcaattgcgcggcgtaatcaatcagtccagatgtctgttaatgcctggaacgcaacagcagaaaaatgggtagcattcccgccatctgtgggtgtgttagaaaatgttgacatcagcgatccaaaacgattccccaaaattattgatgattttgttcaaacagcaacggactacgttgaaaagaacttggagaacgtcgtcgttggttggtataacaaaacggcacctgctggacaaccaagattggagttccgtgagaaatcaggtatgtatggtggtggtatcaatgtgataccaagttctggcaccccagtatatggtgtgtattacggtgcttcctcaaaattaagatcttttgcagaagtgtccggctcagacttgggtgtcctggccaaaaccttgaaactcccaccgattccgtctggtgtggctaaagagtttacgaaggcggcgactgcctggtggaaacagaaaaatatcaccccaccaaacactgattctggggaacaatccgttttggataatttgaagataccacgtaacgccacggtgtttggtgagactgtcaacggtatgtccatcacttggtccggcatcaatttcccggaaactgggaaatatggtggtgctgtattgacaactaatgtgacctgctactatgataaagacaaagtcgcattcacgccgatgatctcccagaaagggcggctactgaacaatccgaagacatatgaacttcctttgaagaaaactattgttcaagccgtgatcgatgaaatttcttcgaaaatggaaattttatctcggaatatgcaaactctgaaaagcacgtcctataatccgaaacaagtatttttggacgacattgttgtcgacaacaacggttcagtcctttggcgcgggcacgacatggctgatcgccgcactactgaattcatgttgggtatcttgaatgacgaaaatagtcgtctggagaaggagggcggcaaagggaagacagctgcagacctggcaacatatgcggcgtcgattgaagaaagtgctccaaaggggcgtgaccttgattggcgggtatacttaaccaacaatggcaattccctgcaggttgattgggaaattactttccgccgcaacacacacgtcggcgccatgaaggaattcagcgctcaggtctaccgtggcaaccgttatctggaagacgtatatgccgatgctaagagcagaggctatgcgccggaacaaccgaacctgatggcgatgtccgatgctcaacgtagcgatgacatggctatgatgaatggcgaagacgcatattccgaatacgagcagtcaatcggcggtagtttgaaaattaatctgaagtaaatgattagcccctgcgggggctaattatgaataaattcttaggagataaacccatgaagacctttctcgaattctttaccgaacaagcagcgcagcctgtgacccatgctggtgtacagggcaaaagtgttaccatcaaaaagcaagctgacggcactcagtggtgctctggtactgttacccagatcactccagacaacgcagctgacacctataacctggagctgaccgatggtaataccgtcaaagcagtgctgaccccggaccaggtacacgcggtgtctcagggacaggaagtcgtagccgttcatgacggtttcgaattcttctttggtaagtctgctgacaaaggccaggtcactgaagcatatgctcaggaactcgccaatatggacaaaatgatcggtaaggcgctgggcgtcggtaaatctcgcaagagcgggcgtaccgaatttgaatattcgggcatccccggtatcggcaaatctgttgctatcgacttcggcggcgaagacgacccgtatgtgatcgtcaccatgggcggaaagcaacaggacatcagcaaaggtaaaacgctggctgctgacattgccaagtacctgggtgtcaagcctcagtaaggaactcgagtgaaaacatttcaagatttcttgaaagaatcaccggattaccaagaaattggcaaccgtaaattcagacgaaaagatggttcttggatagaactgattccggctgatgagcacggtgaattacctccagccacgataacgatcagcccagaaatggctaaagatctgggccttggttaaccaaaatcccccttaaatacagggggatttgtttatttgacgtacatacacacctgggttttcttacctttttcgttcttgacgtccattaactttgaagctccatttaatttcattacagtccctttttctttgctgccggatggtaattcatattctatctcatcaccaggggaaggcatcccggcatgaggtcccatgaccatagctatcttatatcgcggcataccagggcgaccacctttatatgcataccaaccaccttccatcatatctttccattgtttgttaccatcaacagaaatatatgaatggcccaatgcaaggagttcaatatacttaccagatttattgaatttaacttcgctatcaccatcgaacttatccatttttgaaagtgtcgcgaattggccatctttgagacctgaaatttggataatttctttcgctcctgacaatatgaccgttctaccatcaggcgtttcgaatgtggccttatcacctgttatgttaactttagcgaaagaaccgacattatcttcggtagaacttccgatcttactggatttgatatgaaccgaaataggatctggttttgcttctgtaagaaaatcatggaaagttttcataagtcgtctctataatgtgtatattgatattatatagtgcgtaatgtgtagaaactaaatatgatattattcaatgaggacactaaaatggtcaatgcaagtgcatttatcaaccgtggtctgctggcaatagcacacacccatgctctccacttcgtcacgcattcatattccaaacataaggcactcggggagttctatggggacctcgaggacttgctggataccttcaccgaagcatatatcggcgcgggcgggacttatactcccggattcgagaacacgaagttgttcaacccagacccgatccaatatatccagagcatcgttatcgacgtcgacgccatttatcggcagtgtgattctcatctccaaaatacgttagacgagatcaagaccctttgctatcagacgctgtataaactgaagcaactggcgtagtctatagacccctctgataatataattgcccattatttgtcaactatggataaagataaagatgggcaagatcttcgttccaactcatttagaaggctgtcagatttcagccaaatatcttcacaagcagatgaattgcggtgccgtatttgtcgaaccgaatcctcataccaattctgaatcccctgatgcaatcggtttccgccccgatgggtgtagtattttgatcgaggtcaaagtcagccgggatgatttccgagcagatgccaagaagcctcatcgcatcaatcctgagcaggggatgggcagctatcgtttttatgcatgtcctgagggagtcatccggatcgaagatctaccaccaaagtgggggttgttctatttcacgcctcgaaaatcattgaaggctatccatgtcccagacatgcagatatcttccctgtattcccctcagcactatctgaatatgatcgcccgccgaagcccgaatggcaagatgcctccttatctcctccattatcaaaagatggtggaagacttcggccatgtcgtaaagaacaccgtcgctgaacacaatatcctctatggggcttggcgccagctctgtattgctcaaacccgtggtgtggcgtatactgtcaatgaggtattccagaggccaaacatctgatgaaatttcttgacgagcaattcataaattatctggcaccgcgcctggagcgtttctcatgggagcgcgtaggagccgtcgccaagttccgttgccctctgtgtggggactccaaaaagagcacttctaagcgccgtggtcatttcttctatgaccatgacgacgatgtctatcggttcaagtgccacaactgtaatgagatgagcggttgggcttttgagttctggttgaagaaatttgatgaccgtctgtacagtgagtacagcatggagaagtttaaggttatgggggatacccgcgcccgcccggtacagaaactggcacccttgaagaaactgacacagacggcgcgtatcggtcaacaagtggcgaagcgggatgaggaccacctcggcaatatgatccgacttgatctacttgacccaacacattttgctcgccaatatgtggaaggcaggggaatgccggagagcgctctatctttgttgtatttcagtgagaacttccggaaggatcttctcaatttcgagactgatccagagaagcagaagaagatccctgatgatcccagattggttatccccttctggactcaggacggtcgaatgaagattgtccaagggcgagcatttggtgataacctcccagaagggatgttgcggtatgcaactgtcaaaccccgcaatgaagacacgaaggtctatggcgaagaacgcattttaatgaaccgggtgaagttggtagttgaagggccgctggatagtctcttcttaccaaattgcctggcgacggcagatgctgatctattgagcgccaagggggatatctatgttcccgacaatcaatatcgaaacgcccaggtctgtgacggtatccagaaaatgattgacaagggtgtcaagatcgttttgttcccgcgagagatacgctggaaggatatcaacgatatggtgaacccgagcaaagggaatatccctatccgtgatcttctgaaaattatggccgacaacgtctatcaggggcttgcggcttccttacgatttgccgatttgaggaaagtgtgatggacatgaaagaacttgataaactggatgaccaggagatcctccggggataccagcaagcccgagccggatatgttctcagtggttatgaatcaccgagtttcgtacatggatggcgtaatggggtagttgattctggggtgtgtcatcctgatgctgatcagatggatacggcaagaaactatctgaagcaactacgcgaacaaaaataattcttccctccaggcctctatctacgaggcctcgtaaaataattcaaaaatattttaaatttttattgaaaaagactttactcttcaataaagctggcctattatagttcacatagggcggtaaacaacaccccgccgaatgaaaagtgaaaagcaccaactacataatgaggatttaacatgaaaactatcaaaaccatcatcaccaacggctctgtatctttcgaactgaacaccgaagtttccaaagcagaaatgttccgcattgcacaggaagccggtttccagggcggtaagacctccttcatgaacctgctgagcggcaaaactgaaactgcttgcggcttcaccatgaaagaccagattgtggttgaccaggcggtagtggctaaatcctctgacaaagtcagcatgctgaaaatgtttggcctgaacatccacatcgtcgaagcgaagaccgaaacctacggcaccctgaacgtcggcaaaggccgggtgcagctgaacccgctgaacaacggaacctactcggtgatggtattcccgaaaaaaggctacgacaacacagatatcctgaaagcggtcggtggtgattctaaatctcagtatgtcaaaatgggcaaactgactctgatcgaagtgcagaacatgatcgagcgcctggcataagtcgccaagggggaggaaactcccccattctggaaggatatcaaaatggaagaattatattgcccgcattgtggtagtcagattgaattcgaagaaggcgaatgcccttactgcggagaacacatcgactcttggaaagatgaggaagaaactgatgagtaatgaagtccagctgtccgaaggcgccaaatggctcgtcaaacggatcccgaataagaactttgaggcgttccaggctgaattggtcgccgtgtttgagaagtatggctatgacgagcaattgcgtctggcatacaacgaagacaagcctctgatcgtccggcgctgataaagcccaaccctcattcactttcactttaaatacctctgcaaacattgcggaggtattttcttatggccattttaaagattggcagcaaaggtctggaagttaagaatcttcagaccagtctcaacaaaatcgggttcaatctggttgccgatggcatatttggtaaagcgactgacaacgccgtcagggcagttcaggcaggtgccggattggtcgttgatggtattgctggccccaagaccatgtatgcgattcgcaacgcaggggaatctcatcaggatcatctgactgaggctgacttgattgacgctgctcgtgaattgtctgttgaccttgctagcatcaaggcagtcaaccaagtagaatcgcgcggtacgggcttcaccaagtctggtaagatcaagacattgtttgaacgccacatcatgtacaaaaagctgaatgccaagttcggtcaggcaaaagccaatgctctggcccagctttacccgacgttggttaacgccaaagccgggggatacacaggtggagacgcggagttggaacgactccatggtgcaatagcgatcgataaagattgcgcctacgagagcgcttcctacgggttattccagatcatggggttcaactgcgttatttgcggatatgccaatgccgaggagatgttcaacgactttctcactggtgaacgtgctcagctcatggcatttgtcaagttcatcaaggctgacgccaatctgtggaaagcattgaaggacaagaattgggctgagtttgctcggcgttacaatggcccggcgtatgcacagaaccagtacgacaccaagctggctgcagcatacaaatcattcagttagtcgaaggccggaaacggcctttttctttatctatgacagagttatgctgggcgcgtcgcttaattaaaggtgatgagataacccctgtagaaataggaaggttcacatgcaatctgcgagcaaagtagtatccatgaagccagctggtaagaccaaatcagcgcgcaagaaagaagtaacccagcgcgaagacgaatggatgaagttctctaaaggtgatttcaaaatcgctccattccatggcctctctgacaaccagaatctcgcctaccaatctgcccttgaaaacaatctgaccatcacaatcggacctgctggtacgggcaaatcttattgcggtgctgccgctgctatcaaacatcttattgatcgccgtgtcagtaaaatcatcatctcccgttcgccgttgccaaccggacagactgcggggttccgccccggcgacacgtatgaaaaactcgttccatatctccgcccgctgatcgaaaccttcaagaaagttctgaagaccgatactggcagcgacggcttcttcaactatctgtgggagaagcacatcatcgaaattcaggatctggagactatcaagggtatgacctttgatgatgccttcctgattatcgaagaggctcaagaatgcgacatggagcagctgaagaaccttctcacccgatcttcagactcgacttacgttttcgtcaatggcgacatcaagcaatctaacaaacgtttgcgtgacagcgcccttgacacgtatgtcaaagcattccgtgatttcaaccagaaactggaagcaggtactctggctgttcacggtgtagaaccgggtgatgcatatcctgattgggttcaacctttcagcatcatcgagttcaacaaagatgatcgaaatggtcgtggcaatttcactcgtctgatgctcgaggtcaatgacctgtacgacatttaaatacctcatcaccattccccgccgccttcaatctgcgagggcggcgtataatatagagataatttcatgaattaccaaaacatttatgactctttgataaaaagagccaaaacaaggtcattggttggttattctgaaactcaccatattatccctaaatgcttaggagggaaagacaataaagaaaatttggttgaattaaccccggaagaacattatttggctcatcaattattggtcaaaatacatcccaaaaattataagttagcgtttgccgcaaatgctatgtgtatcaacaatgatagatcaggccgatttaacaataaattatttggttggttacgacgtaaattatcagaatccaacaaatctatgtatgaaaggaatccggaattaagatatgtccgttctaaaagaatgaaattaacccatgaagaaaatccccatctaagaaaggtgcaatctgaaaggttgaagaattctaatatacaagttccccgtaatccttgggatagtaaccgagccaccaaagagtcattggatatatggaaacatgctgaggaatattacaactggtggaagttacaccaacaaggctatacttccatggcaaaggcatttggttttaaaaataaaacaacgccacacgaaaccatggttaagaaatttaaatctggttggattccgcaagaagatccagaatggttagattttgtaagtcaatagcctctatgcgtttaatatagaggcggagtatattcaccaatcgtatcataggaaataataaatgagcgacatcaaagtcataaagcgggacggatcttctgtcccttttgatattgaaaaacttcacaccgtcgttgaccgcgcttgtgatgggctggacggggtttcaatgtcagaggtgattgcagcatcaaagatccaattcaccgataatatgagaaccgaccgcatccaggatattcttatccaggcggctgcgtctctcatctctgtagaaaagccgaactatcagtatgtcgcagcgcgtctgaagtcatacgatctccgcaaaatcgcctatggccagtacaagccgccccatctgctggatatctttgtcaagaacatcaaactcggtaaatacgaccgggaattcctggatctgtacaccactgaagagtttgatgaacttcaggccaccatcaaccacaaacgcgataagaacttcacctgggcggccatgggccagctgactgagaagtacctgttgcgtgaccgttctcaaaaagacaagaaagtctattgtgaaactcctcaggtcatgtatatggcgattgccatggcattgttctctaattgggataaggccagccgcctggatatgatcaaaaagttctacaattatgccagcacaggcaaattcagtcttccgaccccaatcatggcgggcgtccgtaccccgacacgtcaattcagttcctgtgtattgatcaaaactggcgacacgctggattccattaacgcgacagccaaatctatcgtcgactatgtgagcaagcgtgctggcatcggatttgacgttggtgcaattcgcggtatcggcagtcctatccggggcggggagatggtccacactggtttggtgccattcatcaaatatctgaccggggcactgaagtcgtgctctcagggcggtattcgcggtggtgctgctacagcttatatcccgctgtggcattaccagttcgacgatgtcgttgtgttgaagaacaaccgtggtacggaagaaaaccgcgagcgccggattgactatggtattcaaatcaaccgcgtcatgtttgaacgtctggtcaacaaacaacctctgtacctgttcgatccgaaagacaacatggatatgtacgaggcatatttcagcgacgtggatcaattccgtactctgtacgacaacatgatcaaagcagcagacgccgggttatgtcgggccaagactctccaggctgaagaagtattccagacgttgctggatcagcgttccgataccgggcgcatttacatcgcattcgttgatcacatgaacatgtatagtccgttcaacctcgacacgatttacagctcgaatttatgtctggaaatcgcgctgccgactcgtgagttccaacaatacgatgatgaaagtggtcgtatcgctttgtgtactctggcatcattcaacctgacggcgtttgatgagccgacggaaatggaagatgtggcattcgtattagtgtccgcgctggacatgctcctcgaataccaagattacccggcccgccaagcccgcctggctgttcaggaatatcgtcccctgggtatcggtgttgtcaacgtcgctcacttcctggcgcggaacttcaccggatatggttcgcccgccgggttacagctggtcgatgaatggatggcgcatcttcactattatctggtcaaggcatccaacaagctggcggaaatgtttggcccgtgtggtaaagaaacaatccattcaagcggtatggtaacagctgacctggcccctctgccactggacctccttcctaatggcaaaaagcctgttggggacgcatacggtctggattgggatgggctaaaaaataggctcgccaaatttggtatccgcaatgctaccctgttggcgatagcccctaccgaaagctcttcgcaggtgctgaatgctaccaatgggattgagccgccgaaaggcttggtgagcattaaggcaagcaaggacggcatctacaagcaaatcgtaccggatgtcgaaacccttgggcctatctatgatctcaagtggaacatggaatgtatcgactatctgaagacggcggcggtgttccagcgctgggttgaccaatctatcagtaccaataccttctatgatcccgagaagttcccgggaggcaagatcccccgcgccaagatgatgcaggatatcttatccttctatatgtggggtggcaagactctgtactacaacacaaacaaagactccaaggaagacgaggagctgaaagcagctgaagaagtttgtgatacctgtgtagtatgagttaggtctatatctcactgtgttatattatcaggggtggagcaattcaccccattatccatcaggaaagaattatgtctgaacaaaagcaattttccgttttcgacccgacatcgaataaccagggactcccgttctttggtgatccggtatcaatccagcgttatgacgttgttgcttggccgtttgtacagaagtggtatgaaaaaggcctcagccaattttggcgcccggaagaagtagacatcaccaaagacaaggcagattttgccactctaagcgatggtgaaaagcatatctatttctccaacctgaaacggcagaccatgctggactctatccagggcgcggccccgtttgaagcattcggtgcctgggcttctaccccggaggcgcagttcgctatcctggaatggacccgtcaagaggcaattcactctctgtcctatacccatatcctacgcaacacggtcaatgatcctggtatcgtgtttgaccatgtgctggacgtagctgaaattgttgattgtgcacaccaaatcagcacctgctacgatgaatctgtgcgctgggcggggatgcgtatggcgggccggatcttcacccgtgaagatatcatgaatgccaagcggtcattctggcgatccctgtttgctgccaacacgctggaaggcatccgcttctacgtttcctttgcatgctcctgggcattcgtccaattccttcaaaagatggaaggtaatgcgaagatcattcgccagatcgcccgcgacgagcaggaccacctgatcctcactcagacattcctgaatcgtcttccgttgatggatccggactttgctgtcattcgtgaagaacttcgtgctgagatgacgcagatgttcatggatgtcgtgaatcaggaaaaacagtgggctgactatctgttcaaagaaggttctatcctgggcttgaacgccaagatccttcatcagatggttgactggctggcgacacaccgtatgggtgctatcggccatccgtatcctggggaaccgcgcaaagacaatccggtgccgtggattaacgactggctagataatactacaatgcaatacgcattgcaggaagcagaagctcctgattatctgatgggcatactgactggttcagtatctgacggtcttaaatttgcataaaggtgagaaatgattacgatctattccaaacaaggttgtgcacagtgtgttacagctgagaacatctgtcgcattcgcggtattgagcatcgtatcctcaaacttgaaaaggactacaagttggaagatctgcaagctctgacgggcaaacaacgcatgtcaatgcctgttatcgttctcgctgaccagactgtgaccgacgttgctggtctcgccgcaagcgttaaacgctgatcatatcaagcccccattccgggggctttacttttgaaaatctcaaacctatacttcctgtacaacacaaatattgaatagcaggaactatatcatgtcaaatatcttacgcaaccccggccatcattttggatacatccaactcccgttggtcatcgacactttataccctgaagacaaagaagccgtttgctggtctccagcggccctcattgaacgagagatattcaaatcagaagtcgacgtgatgtatcgctttgggtcaaatggcgaactttattatttgggcaaagtcatagaattgcgtacgacgagagagcaacgtttcttacgcatagacacaacggattgtggtttgttctcccaactacaagaatatgtgaaacagaatcgtccagtttcccagcaccgcccgttcttgacaagtgtgcatattgacaactttatctctgacgttcaccttgtggcttctactcttcacgatgaagaaactggtgtaccgaacgacacagtcttaaatatggttgtgatcacattagtggagtaagccgctatgagcgatttagtcttgaatacccaattccgtcttcctgtggattctcttgtcccgtttcaaatcatgaaacagatgcttgaagaaggcatggaagttccgttaaaacataatggacaagatatcgggcgctgtatgagttgctcatttcaggatgatgcgtattgggcaatggactataatgctcaaatgccaatcgaggctaacactctcatggaattgggtttcattttcaaattaaaaccaccaattcgtttatacgatatcaagcctgtggtaatacagatacctgctggcaaatcaacttacatgtacttgatatcgcattttatgttttatgacgttgcgccgtcagttggtccgttgtaaccagatggtgtcagtaatcggttcaggatcattcacgacgttaaacgtaatggtgactgccagggaatggtagtcatcagacagagatacttcgacagactgtatttctgccctcggttcataaagagcaatagcatcttcaactttgttcttcacatccacctgaatagtcggcgtcgtgttttccccgagcatcccataaaggccagcacccatatctgggagagtccgccattctcctgccgacgacataacaatattccggacagactgtaacacagcccatttaccagatttcatcgtaacgtctttggtaacaggatgcatcccaaattttaggtccacatctttataatctttcatgttgaggctccctcagcagcacggagaggcattatccgcctctcctggtgtaatcgtatggggttattggctggaaccaaaattaccgccattgtcttccagttccggtttgatatcgatagtgcccggccctgtcggtgacgctggggttgcaccactaagagaactggcccggcccgcgccttccgcatatttgatgttgccatcaatagtttgggctaccgtcaatttgtcagcgatgatctcggacacgaggatcttaggaaccttcaacgttcctgacacttctaacatctgacaaacgatacggaaaatattctgcgcctggatttcggcaagctgagaatatttcatcaaagatgtcccggcaaccacgtgtgaatgattgctggaatgaagatgataaacttcgcctgtcttgcgctgaacttccgtcccaccaacagtcaggttatggtcacgcccgacgtaataccttttgtcgaacatcgcaatatcatagtggtcttttactgatttattgaccacgtcaccattcggtaacatttgtttataggaacccgattggtgcatccagtggagacgctcaccaccaggcgtatcgtctacttccataatgtggccggaacgagaagccataacattgttgtatggatacaccgaaccgccagcagatggaactatggtttcgcctgtgttatcaatatcctgtactcgaccagatggcggcggggtttcttgtacttttggggtgcgatcaggaataggttcagaccatttgctgttttgctgtgctggagctgccgccttcgtgttcgctggaccgggccaacgataacccaaaactgaagaacgactgaaacggctgactttcacgctgtcagattggttgcccccaaggcaccatacataattcgcatcaaacttctggacaaatgcgacatggccaaaagttgggttgttcccccggcggaatacgaccactgccccatatcttggttcagacaacggagaaccccattgaagatatgaacgggccaaagcagatcttgtagatgtgaatccagcctggaggagaacccaaccaacgaatgcagcacaccaactcacttcgtcttcagatgctccaagagaagtggttttgtgatattctacaatccttgggttgttgttgaatttaccagcatattccttcacacccaattcgcctcgagcgacagtcatccatttttcaggatcatacccatctttgggcggctctgggtcaggttgaggttcgtcttctatttttacaggaacatctgtaacagcattatatttttgacgttcaatagactgcacaacctggccgagagccaacgggttggtgtcagaaccattaacctggttggctgctggccacacccaagctattctcaaattctggtatgcttcgtcaagcgcgaaccccatgacttcactgttgacagtaataccagtcggagaccagcctaaacctgccgaggacgcatttgttgcaggcatcataagcacagcccatggcaacagctcagtaggcagaagagtagtgtcttgggtgtgtacgccgtatacacggacggcaacgcgcccgttttcttcgggatcattcacgtcttcaacgcgcccataaaaccaacgcatattttctaacatagtgatgtccaaatgtgtagaggatgttgaagatatttatgctctgtcgaatataatattataggatgcgtcagcatccgttgtatttgatttatttcaactcgcgttgctcgtgaaagaccgtcttacgcagacagcgcccttccaatgccagggaggcataaggcgaggaaacaaccatacagcacagaatgtccgtagaaaaacgatttttattccatcctaaacattcaatagcttagaagccaggagtttgttcaggaacaatgacattataagaaattgcgttcaagaaacaacaaatagacctgtaaaacaaataagcaataaaaaccccgctcatgcggggttttggttctttttagcaagacgagctttcaatgtctccgtaagcatatcaagatgccagggcattaattcgcttatttcaaatatgctatagccttgtgactttaattcgtcacacatcacgaagtaggataataaatcaatttcaaaaattaaatgaaaatctcttcaagactattaaattcgatcttatgctctttaccgcaaccaggacacttaatcttggtttcaaaatgaatgcgcggtattttggaaaagaaatcgtctttaattttctggataatatccgtttccaggttatcgccaacccattgtacaaactcatcacgagttttcttacgagcaactgctacctgaggatcaatacccggttcgttagggtcatcaaaccgccaaacctgaccgtcatcgtcatacaaacaatcgatgaatgtagcaatgctctcttcgatagaaaccactttctgaagcactccagcatcagagaaggatggttgacgcatcttgatgtgatagccacccggcaggtcgaagcattctgtgaaaccttccacgccccgcgccgccaccttgtccagggggataggcacaacgagttcttgaccgcatgcttctaaattgtccccaggataatcaggatcaaccgaaggaactttgatctgattgttgcatttgtaccggattttcattacttcaccgattgatatacaacgcatccgaaggaaaacttcttctacaacaccgattgggagtttggaaaatggaaccccagcgtctacacaagacgaaaataatgattccatcgttgcgatacgttcatcatcaggagtgtttgggtcagccacctgaagtaaagaagtttgttgccccgcagtaaacgcgcgatacttgataacagtaggccaaaattggcttttgagcgttctttctgtacgaggcaatgatggtaaattcataatgtatctccacggtatatttgtacagatatttatagtgaggaacgaaaatgcatggtttctgttttagccagatcggagagcaattgacaatacttcatcctgatgctggtactgatttctatttattcctgtcggattatgcgagagatttgggtgtaaacgccatcgcgatgtctaaagatgacatgaaatttggtaaactggggacaaaagatttattgagatatggattcaatgtcattgtcgtagatcctgtctatagtcctattcaggatgaagacattatacccgtgggtgtacacaggaatattgaaacattgcacaaatattatcccgattgcattgtgatcggagagatcattccgtattttcataaaagaagacgccttcaaacgattaaaagttattttcaagaaggccaagcgtccgttattatggatgtcctcacaagtggttgggttgttaaaagtacgactggcaatagccaacaaatcaattcccgtgtatatgaatatgtgaaagaacgagactacgaactggagaatagtaatgcaaaacgaaaaacgcgccgatcttgagcagttgaaaacagttatcatcaatcgcctaaaggccgtcgtcaccaacgataaaggtgaagtcgcaccagggtttgaaggtattttcgatgaattccaaaccgacgacatgggtaatccggtcatccaaaccgtcgccgggatgatcatgatcgataaagagatcctggaaagcggttctgttcgttattcaccgaacatgggtgttgaagccgaatccctctgttccgaagtgatggacattaacgaagcgatcagtgaaatcgggtacaaactgcttatctgtaccggccattatgtggatcctcaggggcagatcgcttatggtgacgaagcacgtaaagtgaaacgtcacgttgaaactagtgttctgctgaacaccatccgtgagatgcagaaagagcaggaaagcatcaagccgcgtctgatcctgccggatagcaaaatcgtcacccgataaatcggtctaaatacccataacaccaatgaaactatgttatgggtatttttatgaaatattgcggaattgactactcttatggttgcccggcgatttgtgtctgggacgacaaagatcctttggaatttaattcccttcgcttctatgcatattacacggtagaaaaatattgtcgccctattcgaccgaacatcagcattatgaagcaacctgcatattcctcccctgaagaaagattctataacatttccaaatgggcagaagctgttcttcttacagagaaacctgatttcataaccctcgagggttatgcgatgggcaactctaagaactccaataatatatgccaaaccgctgagaacacttctcttttgaagcaagcaatgcgccgtaataatatggaattcgaaatcatcactccttcttataccaaaaagaatttcacaggtaagggcactgctgacaaacttgctatgatagcccacttcgagaagctgttcaacgttaacatgcgcggtataatggatatgttggaagttaaagatccgaagccaatcgatgatcttgtcgatgggtttgccaatatggtaggcggttctgctttcaaagagaatcatcccgaatttaattctgaggtgcacaatggttgattattggttattggcgaatattatcacgttcgcattattgatggcgacggcgttcgtttggttaaaggcgatgctgacattcttgtcttcgttggcgatgcaaatatcgtattattctgtgacaccgcatgaagaccagaatattcgggctgctcaacagagcgaatatctgtccaaatatgttcatttacgcgaacgctcggtcacaatcgttttgttttccacaatgctgtttgcggttatcttatttgtacgatatgtaatggaggccatccatgccgttctatgattatgcatgcaaaggatgtggtcattctttcagccagcgcaagacctgtgctgagcgccatactcctgaacttgatccctgcagcgaatgtggtggtcagatttctatggtaattggcgctccaaaaatcgtttccggtgtccgtggtcctcaatctgctccggacgggttcaaagatgttcttcggcagatcaagaagacatcgggtaaggggaacacaatcgatgtctgacggacaaatcgctcaggttttgacgcctgattcattttcagagatggtattgatgcgcgcacagaccaccagggaaagcctcctggaaacaatggccagcgtgtgcgaagagtatgatatcgaggaatctaagattcgcaagatgattacaccgcctctgttatcccgtttaacagctgagtgcgctgatgctcgtttgttgaaaggtgaactgaaatccaagaaaattttataggttgttaaaatgactaaagaacaagtctacaaattgattaaggcccaaggcttcttgcctggtgttacccgctggcgtgtgggtagtcttaacgagcacgaagaccaaactgaccggatcaaattcacgactccggaaggcggtgtgtatgtcgtggaataccacactcacaccgatgccaaacgcactttgtctgacgtgttcgatattattgagattaacccgaaagaacaattacttcgcggttaaatcaatcaaatatgcgggggtataattactcccgctgtgaaagaaatattgtgtacagaatagccccctggggcgatactatcgaggaaagaaagaatgtctagcttatttgatcgtctgaagcaatcccgtggtcagcaatctgacgctctgcaaaaacgtctggaacaacagggccagcgttcggctgcggcaaaggatccgcgtatctggaaatggacctggaacaaggaaggtatttccgaaaacatcatccgttttctccctatcccgctggtagatctgaaagcacaggaagaaggcaagatcgatgctgagcagattcttactccggttgcgatgatcatgcgtcattccttccaaggtaagggcggctggtacatcgaaaactctcctcagaccttcggccacgaagatccggtgcgtgatcatgatcgtccgctgtgggcgcaacaaaaagagaccaacgacgaaaaactgaaagaggttctcaaaggtcgtctcccgaacaccaagtattatgccaacattctggtgatcaaggatgttaattccccagaaaacaacggcaaagtattcctgctggaattcggcccggcgattaagaaatttttagacgcggcccagaacccgaaattcgctactgatccgaagtttgatccgtttgatatgtggggcggcgccaacctgattcttaacctggttggtgagaaacgcaaattcggcaattgggaaggtctggtgccggtcatggataacgtgaaatgggatgcggtttcttccctgggcggcgaaggtgaagaaggcgacaagtacaaagaagacatctgggaaaaagaacacagcctgtttgagttctacaacccagccaacttcaaatcgtacgaagaactggaaaagcgtctgcgtaaagccctggctatcccggacagccagccactggtagaaagtggtgcagcaactgtcgctacggctccggtgcatcaggaaccgcaacgcccgacggcccaggatagcctgaatcagcagcagtctcagccgtcgcaagcacagcagagcgttcagactccttcttctactggcgctgatgctaagcatacgtcgtctctggacgagttcgagcaattcctgaaacgtgaataacaacacaaagccccttcgggggcttttatcgagactctatatcatgaaatctttcttttccaaaatttgtcctaccctgttgtctatcctgatcgttgtgtccctggtttccggttatgttgatatcgggatcccgccgttcgatggccttggcgtggcgctgatctacatcaacatcgtattgctgatcctgggaattgtattcctgttaatcacgttggtggaaggcggtaaaagcgttctgaaccaaaaggaaatgttgggggggaaggcatcatatgcctggcgtaatacaagagtggcgatcatattcgttgttgcggcactgtctggccatgttctcactgctgtgttgtatgtcaccgcaattgtcatctatcggggatttgagtataccgcccgcctagaatacaaaaagctgtcagacgcagttgacaatcccaccaaataagaaaagccccttttggggctttttaattgctggcgactctcttcaacatccccaatagactactcttttcagatgccgtcaggttgtcattgccgagaatatccctctggatgccgatagagatgcgctcgaagtcggccaggcttattcccgccatgttgtttaccaattgatcgagttgcttgtaggcaagaagggcttcacccgtgaagttgccttgctcgagcttcttataaagctgcccggcctttgacgcagcggtttcccaatctccggaagcaagagcatcagcaatacccagaggaagaaagtcgctggcgaggctgcgtgtttcatattctgtctccgataggactttgttgtatgagaatgaaatattgtattggttaaattgatctgtggcacctttgtcaagttcaatagacgagaagtttacaggatgcgcttcaacaatataaacccggtggacaacctgatcttctgtgtccaattgttcaatgcaaatatcggttacaaaatcttcgtaataacccatctttgtagtgagaggatcgaagattaaattcttccatttgtccataacagacttttcataatagtcattggccaaaaggaatgagagttccaaatcaacgtttgatttgttattcggcattttgatatggttgccgttattattcataggtgtggtgtcgataccgacaccaggtaatgaagcgaccatacacatcatttggagagaacgagaagtttggtttgtccctccaaagaatgcgtttacgatacgcgctgtggaacggaacaagtcaccaaatgacgttgtatctgaggtgtacgcttgaccatcattggctaatgtagcattagagtcaaagatgcctgcaggcaaggggatagtcacctggaatctgttcttccttgacagaccgcgctgcaacatctgtgtaataaaattgcgatagtcttccacgatgaggactccacttaaataatagatctgaaggtatttataggagttgacaaatggcaaagaatgcgatgggtgaagaagatccgctgctgcttccagccgaaatggatgctcccgaattggtgaagcgctacatccgaaagtaccgccagcacttcggggccgaagccaagcgtaatattcgccgctcccacgtgtggttcatggaacgtgtgtctaaggatgccaacctgaccccacagcatatgatgaaagcatttgctgagaacaagcgcccggtacagggtgtccgctatatgatcgggcgcatgttctatttcaaatatgatgccctgacaaaagaagagttgccatactgggacatgtatcccttggtatttttcttcaattttgccaagggggatgggattaattttggtgagcgtggcgtgacttatctgtgggggcttaaccttcattatcttccgccaaaactccgacttttggtatttgaagacctgattaaactgaggaatgaaagagcataccgttctaaaacccgtttgcgactaacgtgggacgcattgaaacggttcgccaaccatcctctgtatgaacattgtgtcaaactttacagggctgatcggttcagaacacagctttatgaaatcgaaccacaatattgggaagttgtcctctttatgcgtactgcacgcttccagaaacaaagccaggccagcgtctggaaggatgctcgcatgcgccataaacccaaaaagtgattagttctataacccgtttgcagcgataattcgcgaacgggttcccttcaacaatgaggctttacaatgtctactatgtatcgtattcttggtattgagtttgttcctgctcgtctggatgccaccatccccatctccaaaggtaagaccgggtttgaaatcggtcgttctgttttctatgaaactcatatggtccaaccgaatttcgaaagtatggtcgccggtatgggaatcagtttagattctgaagcatgctatgacatgcgtgaccttctccgtatcggcgacagcgatatgctcgattttacccaagacttcgtcactggttgggttcattcagccgagctgaagatgcaggcgaataaaacgatggcatgcttccactttgcttcggattatctgaaatcaaagaatcgtgaacttattttccttgaaaacgagttattggaatgcctgggcgaaacagacaatattccgatcgttatttcttcagaaaaaggtctgtctgaaagtgacctccggactgttctcgccgtggggaaatccaccattgtgaagaatgggaatattttattcaacgatggacaacatccgtttgatctaccggcaaaaattgtttacaacgatgaaatatgccgttcgattaccaaattcttcggcaagatcaacagtgctctgtatgatggtattgcccaattaatggaagaagagagctacaatcagaaagttctaaaaatcagggaatacatttcagctaattgtatgggtggggaagacccgtatcttatgccgaatttcttcgatcagtaaactgccacgcctggagatgtctatgagaaggtatttgagacttaatacagttctagaatcattgatagaattttatatcttacaacatctccgttcaggaaacgagcacattgacgacttcctcttgtatgatcaccagataacgatccattcagttgaagtcgttgatgacgatctgctcctggccaacatagagcacagtctgtatgataaccaggcgggtaaatactgtgctccggcattttctcaggtagagataacaccatgctggcctgccgaaaaagttttcaatatagacgatgtggtttatgatgaagcgaactctttcagatagagggttgtgaagaaagtttgttatctgaacattctttttatagaaagtagtttacaatcttcaaaactacagtatagttgaaaacaagcgaaacggctttgtcagccgaccgatttacaacatataggatctacactatgtcttacattctccatattgagtccggcctgaaatttgatattgaaggtaaaactgcgtctgacgtccagtccgaaatcaaagacgctggtctgctgatcggtaacgtaaccatccgccgtatgctcgacggcgtcctgcaaagtgccaacgggtttgagctgatcgattccctgtctcaagaagagcaggaagaaaccctggaggctctcgaccgtgcgaaggccgaagaagtccagccgactgacggcgctggcgtgaaagaaggcgctggcgatgccactccggttattgacgctgaagaaaccgttaaccagccggaagcggaacaaactgcaaactccgaagaatctacggaaactgctgaacaggctgacccgcaggaagtagaagctgtggcaaacgcagatgaagttcgtcgccgtatcctgggtactaacgtggcagaagcgctggccgaaggtagcaatgccgccgaagacgcttccctggccgcgaaatctaagctgaccaacctgaccccggcagttgcgccggaagatcgcaaacgtcgccataacaaacgcgaagaaatggttgaagcggcacgttcttccaatttcggcgcgatcctggcagcagtagaagcaggcgtcattccgggtgtttacctgagctatgtcaatccggatatgcgctggttccagttcccggtcaccgacctggctgataaagaaaacccgcatgcgcggactaacacctacgtcgatctggcgccgatcacttccggcggctggggtttcagtctgtacgtgaaaggtaaatctttcaccaaacgccagaaaatcaaagagaccgatgcggaatctctggttaaagcgatcaatgaatggttgccgggcgctctggaagaagccaaaaacgcaggctgattttaaatcagaatccgttcaatagacgaagggctgctataatagcagcctcttttgtttattggggctttgtatgtcttatacgatcaaaggtctgttgaaaagacctgtccatttgttccataaaccgcctgccgttgtcggggaatatccggcaagaggagagctttattatgtcaaaggctccaacggtagtggcaagtctaccgttccgtcctggatggcggagaatgatcctcaggcatatgtcgtgacccacaatggtaaggtgatgctgaccgtttgcccatcatttaatatcatctgtgtcggcaaatatgacaaatctaaatctaaaggggttgactctctaaaagacacagagcagatgctattcgccgtgtctatcaccgagcaacctgaatacatcgggtatgatgtggtctttgaaggtattatccctgctaccttgctcaatacgtggattgaacgtctaaaccgcccgacccgccgccttgtggttctgttcttggatacccccaaggaagtatgcctggcgcgtgtgagttctcgcaatgggggtgaagacttcaaacacgaactcgtcctggagaaatggaagcgtgtcaactctcaccgagagcggcataaagagttgttccctaacattcctgcgggtatgatgaagtctaatggtctgaccgttgatcaggctgtatctgcgtttctcaatcgtgattttggagatatcgtctaatggaaatttttgctttaaacaacaacgacatgctgaagaaagctgtcctggctatccgtgaacatgggattgagtctgatcccggtaatgcggagattaatactgatggcacccggtttcttgatgacgtgaccataaccgtatcggacatccgtgaccgctggctttctgttgaaggccgtaattcatctgcgctggctgctatcggcgagaccttctgggttctgtcaggccgcaatgatatccgtttcctttcccgagtactcccccgcgcggccaacttctctgacgatggcgtaacctggcgcggcgcgtatggcccacgcctgtacaatcacgggcagctggatagcgttatcaaccgtctgcgcaagaatccaaatacccgccaggcttatctgacaatctacgacccggcgctggactctgatgaaggtttggccgctcataatgaaacaggcgaagccaagaccaaggacatgatctgtaatctggctcttttgttctctattaaaaacggctgtctgaacatgactgttatcaaccgtagccaggatgttctttgggggatgtcttcgattaacttcattgaattctctattcttcaggaagtgatcgctaatgttttgggcgtgaatgtcggccagtacaagttgttctcctacaatcttcattactacaacaatgaagtaagtcgtaaacagcttggtggtatcacctggaaaacacaaacttctactggaggcctggtgtgttctttgctgtctttcaatcgtgacaaagtaaagaaccagaacgacatccgcaacctgttcctgggcgtcctacaccattgcgatatcggaagcgactttggtaaagtccgggagcatctttctcagtttgatgctgacaaagggcttatgctggatatggcttattgtctatggtgtcgcctaaacggttcgaagatcgacaaacgcagcattgctgatgacggtttacggacagcattaatgcattcttcggttgatcggaaatatatttggggacaaggcgaatgatgtatcctaatcttgaatttttcacggggcgcaagcgctccggtaaggacttctgccttgaatctctgatcagtttccatgaaattcagggttacaaagaaatccgccgtctttcattctcagacgaactgcgccgggtggccaattatatctacccatggttgccagcggacgtagacgacgctatcaaggacgttccgttcgttcacccagataaccatcaggggttaaccccaaggcagatctggctccatctcgggagcgcctctgggctgcgttatgttcagccagacctattcctggcgttttttaaacgttatcaactccctctcgttgaggctaatcctcatatccattatatcgtcagtgatttgcgtactccccaggaatatgaatgggcgctgagcactaaatgtcctatcacgcgcatttcaaaggcagaccgtgccggtatcatagaagacgatatagaggcgttcattgatgagatgaaggtcaattatgaatttgtcaatccgttccaggggtgggcaccattcgtcaaattctatgaggaaaggaaatgataacagcagatcatattaaaagactgctccaactccaagaggccactaatgtggcctactttggggaagagtgggaaaagtattggactcacgttgccgtaacgaactcaatttatcgtgaatgggcagaattccttgatgaaaccaccaaggattggaagatttatgggaatggtatccatttcaatagaacggatgccgtctatgaattggttgatgtggtccattttatgctgtcttccatattgtccgggtatggttctgcgttcccgatcgaaatgcaatttgatcttttcttcaaagaaggtcaggtaatagacaaatctgctaatctggtacatgtcaccgaacggttcacgtcgtttatgggacaacccgatatcatccggtttgtacggttcttggtatgcgcctgtggttatctgggactggacgccgagacatacatgctggcgcacaaacgcaaaaatgatcgtaatcggctgcgcgctgcaggcggcgctgactacgacaagtccacagaaatccctctgaccctggagttctaatgtttacgattaacatctccatctcggccgagaatcttcagacctcggtcagtaatttcattgagcacatgaaaccccttgggcatgtggtgctcaattgtaagttagacgtcgaaggcggggttgcggagatgttatttacaacaccttccccaacagacgcattcgtcttgattgagcgctgggcatcggaggacattcctgttccagcgccgttgcaggatatctatttcagcgagacgatttattcactccataccatgcccaaagatgttagccaggctgatattgttcgtctgattaatcataacataaactttgggtgtatcgttcggcgtgataactatcgtttacgcaatcatttcctgtatgataaccagaaccaattggatgaagattcattattatccatcaaaacgatgcaggaagcgattaatattttgtctaagaaggttctgggtgcagaattattaaccacaattaacaaacaagaggaagtaaaatggccagttcattaatggatcgcatgttgaaagttgctaagaaacatgacgatcaggcttcggtattgtctcagtcagacgcgctggacccgaaaattatctgctcgactggtattccccttattgatatcgcctggtccgggcgtgttgatggcggtctgatctctggcatcaaaatgatggtcggtgattctcgtacattcaaaacgatgttcggcctggttgacgtcaaagcgtacatggataaattccctgacgcgatctgtgtattcgccgattctgaaaaaggtgccaacgccgattattggacatccatggggattgacatggatcgtgttctgtatgtcccgatcgataacgttgaacagaccaagatccgtctgttgcagattcttcaggaagtgaagaaaggcgataaagtaatcgtgttcatcgactctatcagccagttaccttccaccaaagaggtagaagacgccatcgctggcaaagatacccaggacatgacccgcgcccgcgccctgaacagcttctggcgcgtcattacacccgagatcaacagcaaagagctggtgttggtctggatcaactcgtattatgatgaaattggtaaccaatatgctgagcctaatatcaaaggcggaaagcagggattcctatcatctaacctgatttggttcatcacccgttcccaggtaaaagaagacaaagacctgctggggtggaacttcaacatcggcatcatgaaaggtcgccatgttaaagagaaagccaaactccctgtcacggttctgtatgatggtggtattgatcgttggagcggcatgctggaaatttctcgggcgcttggctatgtcgatatgccgacttctggctggtatgtccggacagccaaaggtggatttgatccggagaaagagaagaaatatcagaagcgtcaaatggatgatgacttttggtatccgctgctggaaaacccagacttcgccgatgacgttaaaaagatgttcggcgtttccaacggtacggtaatgcctgcgaacatgctggagcagatggaccatgttatcaacaccagtgaataacaatggagggggagtcacctcccccgttaattacgaactcatcgaccccggtgaaggccaaatatccatcatccacattttggagggccaattccgtggtgtcaaattccgtattgggaaagtatcctgggaatggtctgatgacgcaccccggcttatttttaccacggatattttgaagaaaccttggcgtcttttctttaatgatttgaaaaataacgacttgttcactgaagtgtcaggccgtatcttattagacttaatgcagaagaacgctcaggaatacaacaaaattttggtggggtagttgccaatgttactcgaatctgtcgtgctttcccaattgatttacaatgaagaataccaaagaaaaatattgccttacctgaaagccgattatttcgaaaatgaaggtgagaagattatattcggattaattgacgattattcgtcagaatataatgctcgcccttcggttgatgctctgtctattatgctggagaagactccgctcaacgagcatgtgtttgaacaatcaatcgccgctctttctaatatcaatgacaatacattcaatcaggaatggttggtaaaagaaactgagcagtgggcgcgcaataaggctgtacacaacgcaataaaaacagctgttaacatctatggtgacaacaagcggcaggaggagatgaataatattcccaccatcctgcaagaagcgttgtctatcagttttgattcatatcttggtcatatctattgggaaatggctgcagagcaatatgaccatatgaattcagctgaggccaaaattccattcgctgttgagatattcaacaaggctacgcgcggcggtgtaggcaaaaagaccctgaacattgttacgggtgccattaacgcaggtaagaccacaaccctgatagacctggcagcgggttattcagagcaggggttgaatgttttcgtgtttaccctggaagttgctgagaacatttggcgtcaccgtcttgacgcccgtattatgcgacgtgattttgaagtcgttgagaagatgacccgtgaagagtacatcgggacaatccaaaaattaaggacaagggacaacggctctctgaaaggcgatatcgtcatcaaggaatatccatctggggcagggcatactggattgtatcgtcgagatattctggaatatatctcgtcaacaggcatctctcctgacgttatcattatcgactatctgggtgaatcggcgtcttcgcgtcttccggctcatcttatgaacaacaccaacgtatactatacatctgttgctcgtgaattccgtgctcttgggttcgaatttgattgcccggtgtggactggtatgcagttcaatcgtgagaagcaatcagccacagacggggatatcagtgacctggcagatgctatcggtatcccgaaggtcgccgacttcatcatggcattctatgcgccggacgagttggctgcagtcaagaaggcccgcgccagtatcctcaaaaaccgttatgccaacaaacagaaattgaaatcgttcttgtttggtatggatcaggataagcagattttgtttgatcttgactggaatgaggttaaacgagatctcaccgaagaagaagccaaatatgttgagaatgtccatatcaaacatgatatgaacaaaacagggaatgttgtaactgacgcgaagaaagcagaaacggtcaataactggaactttggttgatttcaataaacggatcgtgaggtataatcttcatgatccgaatataaacccaggagcacatcatgttgcacaataatttcatggcggatctgctacgcgccgttgagcaggtgtgccacaccaagaaggatacgatcaatctagacttcgctcagactatcgaattctttaaagcacgccatacttggaaagaccacaatgtgaaagtaatggcgcaagaaggggaattggttgaactcgatttgccatcattccctttaccggtacggaccgaaactcaggaacaatacgaaattgaaggcgttcgcattattcctaagtttggttatcatagtatcgtttacttcttcctgagccggattggggcaaatatcatcccgaccggaatgcgtatctaatagagggcttaacatgtctgtagaacaaattggtttttatgaaatcccgaacgacccggcgctgcgcaagaaactgtttgacactatcgaaaactgccgcgccgcccaagtccgtatcaaatcagaacagacgtacatcactgatgcactgtctgaaatcggtaaggcgacaggcatcaaagcagctgatctgcgtaaagtcgtgtcagaccgcgccgctggtacttacaccaagacaattgaaaccagcgccaaataccaggatctctacgaatccctgttcccgaacgccgcgccggatcgtgatccgaatacttccggtgaatgacagaccccaaaggcccaacgttcgttgggctttcttactttcaaaacctttacttcaataaacatccgcgctatatttcattttattgaattgttgtttctaaatcatgaggtgaaagatggacgccaaaacctatcagatcccgctcgacaatgtcgtaattgtccaggaacgcctgcaaaaattagagcgcacggcaaatcgactggggctggtattcccgacggtgaccatcagtgaaccatacagaacacaacacaaagattctacgtctggcgaaattttctatcgttggtggcgggacatttctcttgaaggtgaaggcattgaccgcccggtttcatacggcggctggtctatcatcggccagttcaatcatcaatacccaaaggtcattctcaacaaactgaccgacgacatcgtcccgcatttcattcaacggttcgaggcagagaacgtctcgtggtgtgagcattgcaataaatcagttcgccgcaataacacatatgtggttcgtaatgaaaccagcggagcgcaaatgctcgtcggtagcagctgcatgcaccattacgtgcctcaccagaagtccctggatgccgtaatgggttattacctgtccattcacgagctgtttaataaccaggacgaggatggaatctacgggagccatatcccgactaccgccgatacccggagctatctgcgtctggtgttccagatcttactgaccggagtcagcatcaagtctaatttgtattctgttgtcatgggttgctttgtagcaggtgaagctccgaaggacaaatcatctgaagcatgggagatttatcagaaggcaaaggggttctactttgatgccctaagtgagatggatcatatgatggaattcattgcatcgctgcctcagaccaatgacttcaatgttcgcctgacccgtatgtgtgaagctgggtatcatctgatcaaggattctaccactgttcgctggggtgccgtcaaatattacgaatacctccaccgcgaatgttcacgtaccaataaggcagaaacacgttgggtgggtgaagtcggggagatgattgagaagaccgtcacctacgttgaccgcaagttcctctacagcggggattggggtgattcctatctgtatatcttcaaaactgaagaaggtagtacgattacatggaagacttcgtatattgatgcggacctggaaggacagatggttatccggggccgggtgaaagaactgactgagtatgaagatgtcaaacagactcagattaccagagcaaagttgaggacgttatgacattattagaaatgaatgctgcggtgttaaccaaattcattgcaggtgaactcaagataggactcgccatatttggtatcactaccgttgccttggccatatgggttctgatctatctgattaagaggaaagattgatggaatgttcatgtggagggcaggggacgagttcttacacccgttaccccaccgtgaaggaagccgaagctgctggattccgcgtagaaaaggctccctgtgtaatcgccttgaaagactgtccggtctgtaagaggcactctcaggacgtctggtatgagccaggcgctcaaccaaagacagtcaatttgctgtccatgatggggaaataaaatgaaaggcgttactgatgaccaattgaaggagatggggcggctaactcaaattatcgcccgcgataaaacgaaaactatccgagcgctcgaaaatgaactcggggaacttaccaaggactctactaatttagaggtcgaattaatcaagcgcggttatgttgtcaagcgccgtttttgggaatactgatatggcaactctcgtagaaacattatttcctggctgcaacgttggccgtgggtgttctgaggccaatggattggaagcagacgtagaaccgaagaactgtatcatcattgataagttccatgacaatcattatcctctgaatcatcgccgtgatcattacctggtttcggtcaatggttgtcttgtatccttgcgtatttgccaggccatggatggatccgggtatggtgcatttgcctatatccatgatgtgtctaatggcgtgttgggtcaggaaaccctgatcgaaaaattcaaaggatggaaagaatcgtttacttcttgtgaaccaccgaaagaataatctataaaaatcccagatataatatgggataacatataaccaaatgaggctgaacaaatgtcactgaaaaacttactgaaacgcatcttcaccactgttgaagccaacgtcactgcagggcttgacaagctgaccgatacagaaaagcgcctgaacctggccgctcgtaaactgtcagacgaaatccgccgcctggaagaagcccgtgtctcgaatgtgcgccaggcaatcaaaatgcgcaagaccgcggaagagaacctgggtgaagctgtcaatcgcgaacaaatcctgaaagacgccattgcccgtggtggtaaacctactcgttctgaagctctgattatcttacaccgccgccgcatcggtgaagccctgttggtgaaagttactgatatcgaaaacagtaacaaagaactgaataaggccatcatccaactcggcgataaatttgatgaaatcaaatccagcctggaactcgtccgtattcagaaagagactaacgaactcggattgtcacttccggaagacgttgattatgccgctggcatggttaatattgacgttgacgcaattctgcgtgaagctgaaatctctgatccgaagtgttcggtcaacagcccttcgaccattgaagccgacaattatctcgccagtctgatcaaataataaattgaggggtataacccctcaatccattagggggatttatgatcatcattgatgggaacgatattatatgggggttggcagttttatctctcgtattcacagcttttaagtttttcaaagctactcaacagaagaaaggtgaaaagaaggccaaagtttgttggggatacgctgacctgcccagtctgaaatacactttgtcgatgcgtaagagaaatgatgacggttctttacaccacctgacggactttagtttggatgcacggcacccagatacatctgccgttgaatacttctattatacgatggacggtttgaagtggcctataataggggatattgttattaaagaagaatgtatctcttgtagggtatatcccacagacggtaattggatccgggtttggtttttcaatcttaataaagaacttgaattcaccaaaaaattattcgatctttttaaagaatatgaagaatctggttgtaaaccagcgcatggcgacgaacctatagaatccataatacgccgtgcccgtgggaaagaattaaatgaattggaaaaatacggcttttcctggggtgacgaattatgccaatgatcgcctattttgtgctgtatatgacatatgcggcaggagacacaaatgactttctttgatgtttttctcacgaatatattattcggattcggggttctggtgctttgcattgcggtacgtttattgaagctcaagaaacgccgctgaaagaacgtcgacaacattgtcagcccggcaagataccgcacccgccaataatttattgaagtctttggggttataattggattacaaataaccccggagactcaagatgattcctctgttagaagcaattcacactcttcgtgagaccaaaggcaccaatgccaagaaagaagtcctgacccagattttgaaagaaaatcctgacatggtcgattttcttcagtatgtgtatgacccacttctttcttattaccgtacaaagtttttaccgaatgcgttccctcgtatgctttcgcgcggcgtcgtcggtagctgggatcaggtgtacgatgtcctcgaccagatgagcgaacgtacactcagcggacagaaagccgatcatgaattatcgaaagcggcgaccaatattcacccggattaccacgaactcatccagatgatcctggacagggacattaaagccggtattgctgaaaagggcatcaatgcggcattcaacgcagcgggcgggaccgggcggctgatcaacgtacttccctatcatcgttatgacaacatgacgattgacctgctgaagaagatggacttccggcgcggggtttacagtcagctgaaatcagacggcatgtttgccaacatcatctgccgacacggaaaagaacccgaaattcgttcccgctccggttctcttattgctggcggctcagtggacaacctatccctggtgtttaaggatatcatctatgatgctggagttggcgagagcgtgttccacggggaactcttggtagtagacctcaaacaaaatgccatcctgcctcgtgctgtcggcaacggtaaactcaacagcgtgatccagacgggggaacctttaccggaacaattccaggttatctaccgggtatgggatatcgttccgtatgaaaaatggttcaatgccgagcgtgttgatatcccatatgaagcccgttacaacatcatctcccaaatgtttgacgatgatggcctggtgcaagtccaggaaacccgtgttgttcattcgtttgcagaagcggtcgagcatttcaaagacgcgctatcccgtaaagaagaaggcacgatctgtaaggcagcagatatgccttgggaagatggtacgagcagccaaggtctcaaactcaaaatggaaattgagtgtgatctggagattatcggatttaatcctgctgacgccaaaggcaagcattccaaaacatttgggtcgctactttgtaagacctccgatagtttactcatcgttggcgtctcggggatctcagatgatctcaggaagtatatgtgggaacaccaagacgagttcctgggtaagatcgccgccgtcctctccaatggtgtacaggacaagacggatgattctttgaaatctttgttcctaccccggctggttgaagttcgtattgacaagaaagttgctaatacgctcgatgaagtctatgagattcaaaaagcgtatgttgaaaacattctggttctattagaggccgcataaaatggatacgctattcaccctgatgtgtacaatgactttcgcgctgtccctggttatcagctcgttgtgtgccctgctggtgtggatagcgttccctgacgttgccaaatataaaatcttcatgtttttagccattattgtcatgagttttattttaacaattcactatgccaaacaggattataatcctgacaaacgttattcttcattggcggagagatatcatggcttcgaatttaaagacattaccagaaaatgattctgaatatttgcgtcgagttgttttggaattgggcgtgaactatagcggaatggccagattattagattgttcgaacgcagtcggattctggaagaaaggctatcgtcggatacccaaagcattccgccgggcgatcttgatgctgaaatttatcaatcaaaaaggactcatgtctgagttcttgagatatgtgggtgaacaggagaaacaaaatggtaactgaatgggaaaagatggaatatgaacgggcgtttaacgtttattgtatctttatggccatcaaactccatttcacgaccaaggattatgattacggtctctatggcccgatgagcaattacaaattcgaaacattctttgccaaagaaggtatgcggaaacagtttgctcgattggcccggcggtttgagacttctcaaggcgaagttgttgagaattatatcattgcaaatttcataaagtcacccaagacctgggtaacgactttgttgactcggcaggcgcaagagaattataacgaataccggaagctgtatgacaacttcacataccacttccttgacttttttgaaaagaatatgattccagaaattgccgggcgcggtctcacgttcttggattatcttaaaggtgacgggcaaaatcatccggcactattgaccgacatcatcatgaaaaaatatccgatttggtttctggtcggactgaacaaaataaccgggttcatcacattttacgataaattgttgaaagaagacatttattggaattcggaagcattcttgttgaagaagacggatgcggtagtacccaatgagaacacggattacgcaagaaataaattccgtgagatgatcctttcccacggaatttgatgttaccaatcccagagcagacgagtcttgtcagtctggttggaaggttccagattggtgctgttgaagttgttcgtcgtgctgactttcttagagttgtcaacattctgttggatcggagcgattacagaagcgggcggctggctgtacacagactggatttgtccgatgttatccgccgcccgtccctgtgtcggtttcgctgcaccaaggcttccaccaccgatagacccatatgcttctttcaactgagaagttttgtccgtgacgttctcagcatctgacgttactcccgaaggaataggcgtcagcgtctgtgcatcctggttagggagtaccggagccgtcgtctgatcctgtttgacttcaggcgctgcaggctgttgtttctgctggtcagattgtggtacaggactattggttggctcttccgtcccgatcatcatagcctgacgcgcttcatccattttcttcctagcagcttctccgcccagagcatcagggataatgcttacaaatttgtcaacgatatcgaacatggcattggttattgcgttcaacatgttgaagaatggctttttcacattctcagcaaaccctttcttgatgctgtccagcgttttactcgcggctgcaatcccgtcatcaatgaatgaactgatcccgccagtgacccaatcaaccaacttgatgagttcactctggagattatcagccaacttaccagggatatcagtgagagaggtgttcttggtgatcccggcgaacagatcgttggatatccagttgacgatggagttaagccactcagcgggcttctcagagatccagagagtgaactggcggaacttcttgcccatgtcagtatcaaacccaaagatcttggatacccaatcgaacaaatccccaaagctgccgaccaattcggtaatacccgcccggacccggtctacaatggttacggatgctttccctaaaatctctttggcgttgatgaatcctttaccgaattcaaatacagaagagattaatgccagcgggccgatctttaagaatttcaaaactttaccaaatggacccaggagcttaacaatcccttccccaatcttggagaacataccaatgaatgcgcccacagcccaaccgattgccttgaacggtttcaggaggaaccctttgagggcgttgaggcctaacatagcggctatggcagcacctatccctgatgagttctcgtctttctggtcatcatcttttgggatgatggaagtcgcccgtggattgttcttaccttctttcccttcctcgccccggcgcatctcttccttttcacgccatttctcgttgctgtcaaaaatacggacaagagcattaacgatatggccaccagtctttcctattttcttctcaatggaagataaccggatcagttgttctgaagagttcttgtcgataccttctgtattccatctgacttcgtccagagtgtcgccaatacgattcaaatctgaactgatgccgacaagagttccttcctgattgtccaaccgcttgaggctgtcatcattggctgctttcaactgatctgatatcaggttcaaatattcagtattggtatcatcagcgggttggcggataaggtccccaagacggtcaaccttctcgccgattttcatcaactcttcgttaccatcaacagcgacatcaacggtatctttcatccaaataccatagtctcgagtgaatatcggactcactcgagcgaagccattgacgaagtcgttgaccgaaggaattttgaactggaattctggaacttctttctgcttttcagcagtctgtagtttctccagatttttgttcatcttcaccagctgcttgttggtctcattttgagcgcggagttgtttcctctccatgatctctttcttgatcttgtcaagaacttgagcaacttcagtctgtgatgtttgtgctggctcagccatggctcacctcttacaccttctgtgattgtcctttgtcaacagggactggcgtcggttgagatgcaacagactgatttgtctgaggaggcagaaccttctcaatcatactgtctttagcgatctcagcaacacattgataatcgttagtcaggcgtgaaattttatgacgaattttcgttatgatataatggcctgatgataacttacttaactcggccaggttttcattttgtttcggcctgtttgatagatcttcgatgtaatacacctgaccaacattcagacgattgtcaccaaccaaaagcaaacgcatgaccgtagatgccagactgaatttgataacacgttttgcataatcaacctgctcagcaccatctggttgcgcttcaagataacgaacgttttcacgattaaactcgtcagagaataaagggtatggatccagatgcgctgtgtcagcaaaccattcggtgtacacacgagaagtaggcgtgacagttttcgttctgaaatcatacaccctttcgtctacagccaggacatcatgataattcgccatgaattggtcacgggccaatttcttttccgctttgattatcgtcctcatgaaacgctcagagttgaagttgttgttttgcagcaacggggcgtcctggggatcacggaagaatttcttttcaagagcggcttcttgtttttcttcagcggtcatagtctgattaccttgattgaacaaagtagtcagacttttgaaatgatatcctgtgaaatcttcatagaaaacaaatggcatgaatatctcatcataagaccgccgggccatgtaatcaatgctcttgagtacaggccaaagcggtgtcgcgaatcgttcttggataccataagttggatctatgtcttcaaatttagtgcgcgattcgagcatttcaaatatctttgccgccatatcggaatatgatccttggagaccaaccgatttacgcagcatgctatctttatatgcatcagtagtgaccaggtgcagccagaacgctttcttggctgaagaatttgactcatcagcaacacgcccaacccggctgacccggaaagataatgcggtgtaatctgtagccgccggggatttgaatgaaatcacgacttcttctccaccaaggataggcatcgtgtccagaatatcccagccttctttgatcagcacattggctgtcaatgatggtgaaacattctcttccaaacccaaatcttgatagatattgaattcttggaataatgaagtcagatcatatggcgttggggttcctccttccggtgtatgaggaaggatggccatatatttcaaatcaaacgtcgtggacggggttaaaataccgtcttgtgactctttgttctcaatcatttactcagctcctgttccagctggctgacaaacatggaaacataatcaggatcaaggacttgaattgcacgtttcgcctggtttttgttgatggcatcatcgtggtatgatatcccggtcaaaccataatttgcaatgatttgggaatcatccataccgtccagaccgtaagccatacggatagctctggcatctgtttcatgcccaaactgatctacatagtatttgatatcccacataccatccaaaccgtattgagcgatcaattcttcaacgatccgttgctctggctttggccagtcattattgatatccattatactgttgatcatacatggtatccaaaacagctcgaaggagccatagacacgctctgcaaaggaccttggggtttccccatcatagatgttatacggcaggagaagcccttcgatgtccttaatcttctgtatgatcatcacacggcgcgataggttctgtaataaaacctgatcatcctgctgacaatcaattagctgatgccagacgagggggaatttctcaaagaatttcataatcgtctcctggattagaagctgtcgccttcggtatcaaagcggcctttgtgcagaggttccagttcgataaatgtcatgtcaatttgggtagacacgatgctatcatctttgtggactgcatacgacgaatccggggtttcgttgacgaacatgtttgacagaacgcatgtcgaaatccggtgcaaccatttgttgcgttcaccttgcaccatgaatgtaatatcaaatgtcgacgggtgcaggtaaaacgcgctggagttcttgttgtatttgtattcaggatacatatgcatcttgaacagacgaatgatctctctgaccattttggcttctttctgagagcgcggtgtgaatttgaaagtgaatgggatttcacggtttctcaccccctggaagatcatttccacgtatgggttcgtcatagtgccggtgaacaactccagagtatcatgagcgttaatcgtcggcaggaacgggatagactctgaagccgattggatagccttcgtcgcggcaaaccgacccatttccttaccaacgttgagagcatcaccaagtttgaactggctcatatcctgggcagcgcgggaaaggaattgggcacccataccagcgagacccaactcagagccgttccagccaacgccatagttggtagtgatggattctggcatacacaggacaatggactcgttagaacgcacgtgacgcgcccaggcatatttgctgatagatcctgacttggcaccatacacaacaggggtattacccagcgggttctggatagggttctgaaccgtctgtgttgcagtgcttccataagaagaaccagagatcctgttgatgttgaacagaacataatggccaagggttttacccccggtgatatccagcggatagaccaattgtttctgggcctgtgtcaagcctttggtgttcagaactttgatcttatccagggtagacttgaaattcgccatggtcttcagcccttaattagaaatagaatgttgacactatttaggactcaattatggctatgtatcttcaggggaaatatgcccccgtaaatcccaagaaatacaaaggtgacattcataaaattgttttccggtcttctctagaactggtggcattcaaattttgtgatacaaacccggctattgtctattggtcatccgaagaaactgtcatcccttatatttcaccagttgatggtcgaccgcatcgctattttatggatttgaaagtatggaccagatcacccaatagtgaagaactcaagatcacgttgatcgaaattaaacctaaagatcagattaaagaaccgaagaaaacgaagacaatgaaggaatcaaccttcaataattctatgcggacttatctggtcaatcaggctaaatggacagcaacccgagagcattgtgcaaagatgggatggtcatttattatctggacagaagagcaccttgttcctggggaagatcctgatgtcaagaagcaatttgctctcagatctaaaatgaaaagagaaaaggaaatacaagatcggcggcgggaagagaacatcagggctctgaaagaacaaatgaaaaagaccatcaaatcgaacgaaccaaaggaacgtgatgatggtctcttgttgccttaacttatgatcagctatgcccgggagctatgcattttaatttatcgcgactgatataccaaccatccttccgggcttctttagcacattcagcatatgtctcacccccatatattttgggatacgacgtgctgtattgggaagatctgtattgagtgcagtcagcacaatcgcaataaagttccaatgaataaccagacacgatcataatcagttatccagatggtcgtaaatcacgcgccggaaatcattacccttggcacagcccttggcaacaagacgagtgccgccagtaccaatgacgctgatcgttgaaaaccgcaggacgcgcccggtaatggactggtcgacctttacggtttcaactttacccaaacggagttcatctgcatcacgacggataaaccctgttttgaagataacgcgcttgttggtgacggcaaattcagtcgtcaggttccgaatgatcgtgggaatcaggaaaaacaggctgataccaaaagtcgggacgaggaatacagccacccagaaatagacccaaaatccactccaccaggtcgggcgggtaaagccaatcacgtgttcgttctggccgagcatacgatctacataacgcattttgttttccttatttgtcggggtttacgcaaaagggagttgtggtcagctcgcctttatcattaaaactatatttcagaatggcaaattggtcaaccatacgatagacttcaatgccggcattcatcatttctacgataccagtggtgatcctgtacggttcacagtagatcactttatcgatcttgccgctggcaataatacgtttggtgcactcagggcaaggactgtgagtgacgaacataaccaggccacaccaatctgccgcatgttgaggtaaacggttcagagcattttcttcggcgtgaataacaccgtcagataccagttggccgtctacttctatttcgcacacattaggagcgccgggcgcggtgccattccagccaatagccaacggctgatcaacccgaggatctacgataacacatccaacctggagacggcgggcataactggttttgccatatgcctgggctgctctcatatgggcaaacatcatgcgcggcttaatcatggacattgacctcttttgagaacatgaagatcaggtcttcaccgtcaaatttgcatgaaactgccagggatgcgacccagctatggatgatattgctgatgacggttcgcatttcgtctttcagtgtatcattgacttcgcggcctgcgaatttctcaagcgcggtggttatgacattatcggcatgaggataatgattgacataacgcatcagatatttctcacgcagaacgattttgtccgtaaggtcagacaactccgcagcttcttctgaataaaggcgttctttggccttcaattctaacacacgttcatacaactcttttagcggcaacataatggtatctcctaatgaattaaggagagtatatactctcctttttcaatacgctttcaaatttagttcaggcagatttctcgccccagcgcagtcaggcgatagaactggatcacctccccacgagcatagcgataattgccgtcaggggcgtcatgaccgccatcatgggttacagtaaaccaaggctcaatcaaccctttcttgagcagagactccccggtttgggtatcccaaggatcacccaggacgttggtcagatgccggctcggggtaaaattccaaacgcggacacctttagaatttttccaggatttggcataacgtttggaattgataataagccggttgctgtcttcggatttcaacataccgaacatataattcaattgatggcccgtatagcgaggccacttttgagttttcacaacagtatctttcgctttcataatattcccgctctttcaaggataatttcaacttcaccccaatccacgaaggggcgcttagacattgggtcataactcagaggacaaccaagagcagcgtcgtcaatatacaattgcgcatatgcttttggtgaatctgtccattcatgctgtgtgggattcttgttgataccatacagcgggatatcaaatgactggaaccaatcaaccgcttcttcaagttgtttcccgctgcgcatggtgaacagaatcagaagatgatttttatccaccaacttctttagaatctctacagcaccgatatggcgtccgatgagagggtattcatgggtaacgcacgtcccatcaaaatcgataccgattatcataatgattccccattgtgcagctgtaacagttcttcaaacatagccgggcggcgtaaatgatcccagcttgagttcaggtaatccgggttccctactttgcgggaatgccaatgcccgtgaacattatattcccaacgatccaggagtacgggcacatgagtgacaatcactttggagacgctgccgtcactccgagccatcttgtattcaaacaaagaaccgaatttgctgatccattcacttaggaataactgcatcagcattgaaaagctgtcgtggttcccttgggttactttgatgttgaagttgggccgccaatcatcaggaaccttgccatgcatctttggtaggttacgcgccgcgccttctcgcatcagttggataaaagcatccgggccaccgaagcatgtgtcgcccgtaatgatcaaggaatcatcccgtccacacgtttggaatatgctgtcgataactgcgatgtcgtgttcatcaactgtttcaaatccacgtgatttggggatctttttatgtttcaggtggggatcacccaaaaagaaaactttacccgccatattcttttcctatgagatcgttatagaaattgattaacataccgtcaatgattacaccctaatcattccgagtgccttcgcaatatagccttcggcccctttcaaagaatccttaatgattttatgaaattcttcgtatgacacgacatggccgtcagccatatatgtgttagtcgtcatgccgtgagaatcacgggcataataatggtataattctacaccaccaacattgaatgtgacagttctggtacgggatatgctcatgatttgtctcgggttagatagatatatcacaataatacgttatttcgtatatagaaaagccccttacggggcttcatctttatcagatttataaacttcccatcggcctattccacgccattcaccaagatcgttccaggtgcgagtccctacccagccaccaacttcataataatgacatatacatgcccagaagtctttgaaagttactttccgagttggtttcacacatgcgatttgccagcgggttaagctgattgcctggaacaatggatggatataattgctatagaccaaataaattgcgatgagcacaatgcatcccacaaataacataccgatggcagtgaaaacaaacattattccacctttaatcccatcagatcttccatggttttctggatgcggagccaatccagcgcagcatcataacgaggatcatggtataccatgccttccagttcccatgccttgatgccggcatagcggtccatctggccaacacctttcagccagctgacgatatcaaatgtgtggtgataatcccacggctcattggagtattgcccgcaagtcacttcgatgatatgttgggctttacgcagatcaaatagatttcgatcacaccagtcaaccgacctgggatcaacccccagtcgatgacaccctttgcgaatttcgtcggccagctgatagatggagatatcgtcttcctttggatacaggctgacttcacgggcggcatcacatggattatatttcccgtttcccagccaccagtctacagtcactttctctttgacacgaccgaggtcgatttgctctttgacattcaatttaatgaatgtggtacgttcttcaactagttgctggagagtataacgtttggtcaaatcagctactgtctgcgcccaggataacataacagcatcatcccagcggcccagggtttcactatcggcgaccgccaaaatatttgatttatacattgttaccctccacccggataatttcttcttcagaatcgacgacgttgatatcatcatccagcgcgttcagattttccatgtcttccgcaaacttgtctacttccatgatgtagaacacggggacaacccggcggcgagtgtcttcatacagggtttctgccagtgcttcaacctggcggacaacgtcatacagattaagaccgccgataccacagccgatagctggcaggccgatatagaccgtttcagaatcctttgcttccataatctcgtgaagttgttcaaacatcacttgtacagaactgataacggaaggcatacgagcatttgggcctgtatagaattgagtatacaggttgaagccccaaacacccgtgtcacggtcaaaggcataagacatgccaccgagacgctgctccggcccgcgctcatcgttctggtctgcgcgccatacgtcaggaaaccccagccgaacgaaattggcgatacccgcgcccatcaccgaccagcaattggcgccatgggcgaatccgttaataagattgaaacttttcgcggcttccaacaaattcccaccacgaacgatatacgttgtcatacaattcttctccaggtaatgttgatgtcatcaataaattcaaggcaaaaaacgccgccatgtccttcactattgttgatggacatgatagatgttctctcgtcggtggcgataagattaaccccaaaccctttggacatcaaacggaaagcgatttcttttacgatccgattgagatacgcaggggtggttgccggatcaaaatatttttcgaactcaggcatcaccaattccccttcatcacgctttccattgcgttttcagaaatatattcgatgaaatcattgtcggacgccatcttcaacaactcgaataattcgccaccgacggtgcaaccaaacatcccttctaacattcccttcacgttttcatcgatttcttctgggtttaattgatataatttcaagcgacgtgaaatagcccgaaattgcgcgatatcaccgggttcaaatttggccatggtcatttaccagttatgggattaggcggtaataataccgcctttttattcaataaaggtcttcggagaaaagctgattgaaaggagtattcttcagacgaacttggttgacttgcccggcttctttagcgacgatcgctgcctcttcacgagttaagaaattgccttggttgtcgatgaaaccctgttcacggctatgggttgtagtaatgaccccagcttcttttagaattcttaactgggaattcatcaataggctgtggtgacgatcagcaaccacgatcacgtcaccatatttgttggctgcggccacgacacggcgctgccattccccttccttgggtaggtcacgagcgtacagggcaaccattgtaccatccggggttcctttcacctcagagaacaatcgtccagtaccaccagggagttcacggaaataaccaagtagtttcataatctattcaatccatatttcaggttcaggaatatcgaccatatccacagtctgatttttcagatcgtgaaaacagtcgccaagaaattgtattttgccatttgtcaagaacaaatggcagcgtgagcctgggcgatctttaaacaccaataggcttggagtgaaagtgggtgcaacaacgtcattgttccacgcccagatcgggccttgttctggagaacccttcacgcgatatgggtgaagcatattacaaccaggacattgaaaatataaagaatcacccatagacaataattttgaactcaggaatctgctcatcagctgtccatctcctcatatggattgtaagggcgcaattccccgataagtttaggcaacaaggcgaagccgaacagattgaaggaacgcatagtgcctaccatgacaacatcatcgtcttcgtcagtgatatctttcaaagaacatatggggacataggcatcgaagtcttctccttccccttcttctacaagggcgaatgcgacttcttctgatatgaagcgagggatgcatatgtcaagcacccaggcaaggaatacaagaacggaaatgctgcggaaatagaacatattaaagccctcgcaggtggcgggggccaaaagccccctgtattatagatcgagcagagtttccaactcgtctagatcttcgttgtaaagatctatgtcctgtttcttatttaactcgtcccgttgaatttccagattcttgatctggttcaacaggcgttcgcgggcgtccaatgtaatcgaggatagagacatcttgaacaaatcgtcaagatcaccatcaaagtccgggtagtctgtctgaaatagtgctttcaattcagtcaaactgcgacgcatatctgtcacaactgcccaaccgataaacagagcacgattgttcattttgtggatacgggcgttgagatcagccaacagatattggcgacgatcttcataccgttccagccgatagttgaagaatgcgtacagcatatctttccaaccattgaaacgttggataataccgcattcgttccaggatgtccaggtcggcatttcagctgagtacagccggaacatctgttcaactttggcgtcatctagtttagacaattcaccacgtttgaacacaacagtgatatcccaaccgtcttctgtggaatcgttggaatactccgtgagaatccctgatttatacagcggaagaataatcttggtttcataatccttggcgaaccagcccaccgggacttcagttatgcgtagggtagtggcattgatacgttcgtacacaccgcgacagtacactcggccttcctcagtgtatcctgtctcccccttgtaaccattccaatacggtttcaagtcatttgggtcttcgccacggagaagcgctctcagggcatccagaacagactttatgctatggcatggggttttggtagcatagccgctaccgataccgttcataccattcacgaggaacattgggataaccggcaggaaaaactttggttccagcctttcctcaccaagataattgtattccaggatgccttcatcttctttccgatagatcttacgaatcacgccggagactgccacagaaatatatcgcggtgatgacgcttctttacccatgattgatccgaactgaccatcacgatcaaaatacgggatattgttcgtccctgggaaagcctgtgccatattgacgatagtgttgctcatgttctcaccaccagatttgtaattggtacgggcggcggaaaacatacccaggcggtcaacaatctcttctttaccgtattccaacgcagcaaacaaaatttttcgctggctgggcttgaggctgtcaattaacagaggaatttggcgaacgctgttaacaaccgaaaattccttatgatcggtgttaacaaatgatgtcacagtaatgcttttggcaaccatcttattcatcctctgtttcaaacaagcaaacgtcactaaaccaggtcttgcggtaatccgacgccttatcaccgaacccatcattcaatgaattcttgtaggcatcatccagaacgaccgtcgtagtatacgcatccagattgtttagaatacgtttgaaatcttcggtgctgttaccgcccagaccttttagatatttcttctttgtgatctttttagattctggggtcttcatgaactcttcgtattcaacgttgttcatgaattcatgcatggtgttaccacaccacacgcgcatgtacggggagcgcagaagtttaagacgcccctggcgcacatattccggccagaacgtacagtacatggtaatcaacaggccacggatatgaatgccgtcgtcgtccgcgtccgtagcgacaaccgtgcaaggataacggctggtgtcaatcggttgccccggtactgcgccgccgtggatagtacacaggttcttgaattcttcgttggccatgaccttggcgcgcgaagcattcaaacagttgatgaatttaccacgcagaggaaacagacctattttcttcgtgtcacgagcattgaggatagggttagacgcgctatcaccctcggtcaacaccagtacgcagcctgaacgatcaccacgggccgtcgcgggataatacttttcaatttcacgataatcccgtttggtgatttcctttttggccttttcaaactcggcatcatcctgatcattacgcagagccgccagttccttacccaacccgatggtaacatattccagcgccttacgaaccaggcggtcagacggtttgtatgttgtcccaaattggctgacgggagtggtcatgcgctctttagtctgactatcaaaccgggggttatcgatgtcagcagatatgaaaagcatcatatggttcttgatcattgctggcttcaattctgtcttgaattttttagacagcggagtacgaatcgcagcaacgatctggtcggcaacatagtcaacatgcgggccgccgacgtgagtagcgatactgttgacatatgacgcatgcatgaacgtaccgttcgaaggcgcgatagcaacagaccaatcccctgattcgtctacagatgaaccctggcagaagtaatccacgaaatgaccaaagcgatcaatccggataggcttgccattaaggacgatcttcagacgagggttacacgccgctacttcaaatgcccggcggtagatcatcagcagattattgttatccagacctttgatccccagacgctcataatctggaatccaggcgatggtcgtacccggcgcgttcaggttactgatcgtcgggtctgaacgtttgctcatattgttctcaaacgtctggagataagacttcttgccgtcgttggtagatacccggaaccattttgagaacacgtttacgagagaagcgccttcgccgttctggccaccagatttcttgttgttgtactcttcgtcatcatcgttgaagttactaccagcatacagggagccgaagagcatctccgggagccattctttggtctcaccgtgttttaccacagggatgccgccgttgtcagcaacgatgatctggccgttcatcgccattaccgtaacagtgatctcgttgaggcgtttcccctcaggagttttgctatggtcaacacagttcgtgataatttcatcgaactgtttgatcagcgccggggaataggtaaagttgtctttgaatacaacctggtcttttaccgggtcataaacccaaaccgtcccggatgttgaacggatactacccagatggcgttctgggcgaaggaggatatgctctacatgggagagcttcttgtactttctttcaatgttaacgttactggtcatcttcctatcccgtcaatgtaaacacacaagattatgtatgggattggcttatagaccaaatttgccccgccacttttcgactttgtgctcaatagcgtgttccaccttgacaattgtgctgacatggttttgattgcagtcgcacgcaaattttgatgtatgcttgataatgctgttaatcagatcgaccattcgatcatttgaacgctggggctgattcagaagtcgagtgattcttcctttgaaatggttaatcatcgccagttgtttatcaacgggatcaacacccccgcaaaaccaataatcttctaacgtgtgctcagacaaatcacttgtgtgattagcctgggccaatgcatagatgatagaatcaaatatttcgtccttggtcatggaaccatattgctggacgtgttgatattcagtcacatacagcaaatccagcgctgatatgatgacgtctgctacttcgccattcaaaggctcagacgcggcgataccatagaacacgtctgataattcacacgtttcttctacaagtttactgaatacaaatactgaagaacgagagggattcatcgtagtgcaatcatacgatgtgtttaaaatattacgcagaaatttcatttcaaatatccttctagacggaaacggttgatatgctgtatgataaagtccatagaggtttgaaaactatattttccctgatgttcatatgcatgtatcaggggaaggcggctgtgggctaattggaaacgcagcttgggcggcatcgtcagcaatttttggcttgttgctgcaatgatgtcgtgtttaaatttggggtcatcaggagacagaacgacaatctgcgacttggccagagtctgaccgaattgtttggcatcatttccataaaggctacgcaggtcatcgtgccgatatttgagccaataccagtagccttccatcgagttgaaaacaccatcgacagtatccatgggatggtatgcaaaatgagacaggaatctccccagctcggtgcggctccgactgtaaatgttgtaatgtgtcttgccttcgctatccggcgtcatacgatcttttggaacattgagtaataggaacatgatataggattctcaaatcaatatattgctgtgtgtagcagatttataatttcctgaatgcgatcaagaaactgacgacagataccgcaccaaacagcccagacaatataaatctgaccaaagggaattcaggggccgcaacaagactaactgcgttttccaggcatatcatgaatgatataccacaaatcattcccagggcgaactgattcggtttatgacgtaaacgtaccatttcacacctcctctggttgaatataggggctttggcccctattatttagccgagaaagacaactagtttcaaattagtaagagcagagcgactctcttttaacattttatgtgcagcatcaaggcgtttcggatcgtgtaaagtatcagagaatacaataatatcagccttgtcaatcttggtgcccatataatgactaattgtggtggtactgtctttcttatcaacatgcggggccgatacgttatagggagaagaaaagaaagaaccacgctcgctttcactgtgaaagacagccataatacggacgttattttctgtttggaaattgtaagacaggagtttcttcagcgctgctgtatgacctgtctgcctgatcatacggtaatatagaatgttgcctggttcaataacatctaccaagctccgcgattcgcggtctttttggatttcgtacgcatccaatataagttgttgtatcatctcaacgtgagcattcaatgagatttctactctgcgttttaccatagattgcatttgtgtatcctcggttaagttccgctcatggggaactcgtggattataccccgagtaacacataaagaaaaagaggccgaagcctcttttattcatcatatttgcctgtcctgaaattccatttcttggctttgctgaagtcaatatccttgaagatattcccgaagagtttcttgaactctgattcctcttcaagatccttcggtttcttcacgggttccttgaccataccgccttcgggtttccccacatcggcggtcgtggtggcaggaggagaagaatcttcaaggaaatccttgaaggtcttcatattagactacagccatttcacaacgggtagaagtcactgagtggccatcggcatcagaaacaacacaccaatattcgccttcgtcggcagcatccacagcagtcacaaccaggttagcggttgatgcagtcgcgttggtgccagcgtcaataaccgaacctgcgccacccggcacatcagagaaataccaagcataagtgtacggggtagtgccgcccgcagcgacaacgctaaatgtcgcgtcttcaccgctggtgacgtctttagttgccgtcagatcggttgaaagagacaaagcgcccgcaacggtgatgacggttgaatcgacatggttgccttctacggtgacgccatagacggtaacggaaccggactgaagcagtttgaatttaccgccgccgatatggaccgctttagtcacgtcaccggaataccagttgacgcctttataggtcgcattcgccggggccaccgtcgccagaagttcaaccacctgcccaatttcaccattggcggttgccggggtgatagtcaggccagtagtcaggactgcgctgggatcgtgaatttcgtaagataccaggaagccaacgggcttcgaaggatcgattttggtcacgccgtctgcttccagattagatttggtcagcagtgcatcaagacctttacattcggtcagaatttcgtccgggtcttggttcaggctagttttctgccagcccttggcaaccccggtaacaacatgaccacgttcggtctccggtttgttgcgtacaacatacggcgcgactaatacattgattgttggcatggtttcctccactcatccaaatcgttgttcagagccatcatcagctcgttatctggttcataagaaccggaacataaatcatctctccatacacctaacgtcaacaacgctgctttcagacgaggatgttgggacttgtcagttttcaacaccaacattcggcataccgcctcagtctcaaatgtgttgaaaagcgtaatcaattgattgataaggactcgggggcttttcccggggacaaatcgtttcaatgattgattaattagcgaaattcgctgaatgtccaccatcaaatcatctcttgagacacaaggagtaatataatgcctcagagcgtattccattaaattgctttcatcaacaataggcatatagaataagttcagctgttgtacactgaacttatttaatctgaagtttttcgatcaatttggcgatcagtttgtcccggtctgtttctacaatccccagaggctcacccaataccgacagatcgttgatatccagaagattgagggtttctactgtaatatcagtgttgatgaccgtacccggttctatcggtcggccgaatttgtcacgaccataacgtttgagggtactggcaagcccggttagctcctccagaagctccttatcgccgtttttatgctcacacacccaaccgtagtcgccagcatataccgtggcgccgtcgccaacgttcgggatgttatccaggatgcgctgcaggtatgatggaattttctgttcttctactgcggtgattggatcaacaacagcagtatctttaactttcggtgtcttggccatgttcagttctcctatagactttgatatatttaccacagcaattgcattggtattcatgcataaaactcccgtcgtcattaaagtcacatgccccacaacgacagaataattttacgaattggtccccttcaatattcctggccgggaaatgtttgtatgaatattctcgcatttcaccgtcaaattgaaaagaatcaattaagaatttttcagtcgttctataaggcccaaatgtctggcgagcatatttgaaataaacatctctggtttccatgaattaactccaacaaaaaggggccgaagccccttattttacgctgtcgtga

SEQ ID NO: 40 - DNA, 165587 bp, unidentified
  source 1..165587: mol_type = genomic DNA
atgctcttctcattttttagtccgatagattattctgcaaagaccgtaaaaggtgctaaggcaaaagctatcccaaccgctgacatatttcgtaattatcgcaaatatttcgacactgtagcagaaaactatcttttacaaacatattacataagtggagctcctagaccagaagaattagcatatattctttatggaaatagtcagctgtactggattcttttaatgtgtaataacgtatatgacccgtttagagattggattaaaacccaggatgcatgctatcaatttgcacaacaaaaatatgcagatgtaggtggagaccaaatactctatcacgtggatgcaaacggcaatcgttattataacctcgagcaatatcctgaaaattcaggcatttggtatgataaaggggactttaatcatcagtaccctcaatatactggggctttagctggtgttgacatttatgaagactctattatagaaaatgaaaaactgcgccaaataaacattatcaatcctagtgatattgaagcatttctttctgatattatacgagaaatggaaaaggctcctgacagtgaatatgaatcaggtcgatataaatcccagaccacaattggagaagttgtatgattgaaatgaatgattcgttgaaatggtttaccggtgttgttgaagacagacaagacccgttgaaacaaggaagagtgcgagtacgtgtttatgggcttcatccatttgaaaaggtgcaaggagctataaccggtcttcctactgaagaccttccctggatgtcagtgattcagcctaccaactcagctggaatttctggagttggctcatctataaccggaatggtagaaggaacatcggtgtttgggttatggcttgatgaattcaaaacagcaggattggtaataggaacatattctgctcatagaaaaacaaagccaaactacacggaaggcttttctgatcctacaggtcaatatcctagacaggtgggatcagatactaacccgttagttcaaggcgatgaaactgggtatagtgctgtaccaaatatcatccaggacagaaatttagacattggcattaatcctgatgacgctgacttaagtgatattcctgaagacccaaatcctgcaattacaataacagatatgcttaatagggatgaaggtcttagattgaaggtctattgggacacagaaggatatcctacagtcggtattggacaccttatcatggcgcaaaaagtacgtgatatgtctgtcattaataaaactttatccaatcaggttggtcgtaccgttacaggaaatcctggtatcattacaatggacgaagcagttgcgctatttaagcaagatcgtgataaaatgctttctgacattaaaacaaattcacgggtaggacctgtatatgctaaagtcaacaagtcaaggcagatggctttagaaaatatgagctttcaaatgggtgtaggcggtttagcaaaatttggtaaaatgcttgatgccatgttcattggtgattggaaaaccgcttatacagaagcaagaaactctgtttggtttaatcagacaaaaggtcgtgcttctcgtgtttccatgattattctaacgggtaatatggaatcatatggagttcctgctccaaagccagaaggaaaaaacctgtctgctgcttacgtagaaccaaagtctggaggtaatcctgaagacccatggactccggaagattcaagaattcttttcaaagaacctgagtcttcatataatggtcagtatccatatgttcacacaatggaaacagaatcaggccatatccaagagtttgatgatacacctggctatgaacgctatcgtattgttcacccaacaggttcatacgaagaagtagctcccgatggacgccgtaccagaaaaactgtagctgatttatatgacatgactcagggcgatggaaatattttaatctctggggataagaaggttaacgttggaggtaacgagacctattataacatgtataatcgtcgacagcaaattgatggcgataacacgctttatgtacgtggaaatgaaactaaaactattgaaggcgatggtactatttttgtcaagggtaacattaagatagtcgttgaaggaaatgctgatatccaagtcaacggtgatgccactactaaagtagatggcaaccacgacgtaaccgtcggtggtaacttaacttggcaagtagcaggtactgtgaattggaatgttggtggggcttggactgagacaatggcttctatgagctcaatcgcccaaggtcaatacactgttgatggttcacgaattgatgtaggttaatcatggctgatatacttcctattaataccacgttacgcgaagtaatagaaggtgaatacgttgagcagtactttactgctcaattatctaccaacgaaacattaaaatcaataaatattatcgactatcaaccagtatctgatatctctgtgtctgaaacctattataaaggtaattataactcagtttttacttttggaaacgatgtgcttaaataccgtgaaggcgatgagctgaagtccgcttcagcgtgggaggatttacctaatcccaaaactgctgatttatatctgtggaaagcccccagaacactagagaagacatttacctatacagttgagataatatatacagtgacagaagaatcgtctggaggttcatccggaggttctagtgctccaatcgtaacagaatataaaaagcaaaaggtttactctcaaaccgttaaaggtaactggagcagatggggcgaccaacttcgtgcttacgtatatgcggggaattaaatggctggtctttcatatgataaatgcgtaactgccgggcatagtgcgtatcctccgacagaagtaaatgctacacaaagtaaagtattcactggtggaatagcggtattagttgatggtgactcaattacaccgcacaccaagacggttgaccctcatgatacgcatggaggggttgttcaacctcgcacatccaaggtatttgtaacaggcaaaaaagctgttcaaatggccgatccaatttcttgcggcgacactgtcgcgcaatcaagctcaaaggtattcatacactaatggctattaaagaacctttaaattatcagttaacgcgtactgcaaacgctatcccagacgcatttactggagcaacattcgacgaaattaaaaatcagcttattaactggcttagtggtcaaaaagagttccaagattttgattttgcgggttcgcgcttaaatgtgctattagatttattagcatataacactctctatatacagcaattcggcaatactgctttatacgaaagctttattggaacagctaacttgagaagttctgttgttcaagcagctcaacagaacgggtatttgccaagttccaaatcagcggctactgcgtctattatgcttgaggtaactcatccaaatccagagccagcaataaaaatacctcgtggaactaagtttttggcatatgcgcgggattcatcagtagacccatacaacttcgttgttaccgaaaatgttattgctttaagagatacttcagcaccagaaggagttaataggtatcttcctattgtcaatttggcacaaggacgtattattcgtactcaattgtcatatgacccgaagaaacctattgttattcgtgatcagtcgattgaccgtaagcaggttaagctgtgggttgatggcgctgaatggactaactggacagacaggtcaatggttcatgcttcatccatttcaacaatttattatatgcgtgaaactgtcgacggaaataccgaattcttctttggtgaaggcgtggcagaagcctctgtagcaggaggagttcttgaaagtaatttcattggtggattaaaacctactaagggcgcgcaggtagttattgaatatattcgtactgatggtgaatctgcgaatggcgcaactgatttcagctatgctgatactctgcaatatattgtagtaaacaaaatcatcgaaaactggtcggattctcctgactacgttggagctgatggtggtggggaacctgaagacattgaacgtattcgcgaattagcacaaattaagcgtgaatctcaaatgcgttgcgtgtctaaaactgactatgagtcattcgttagctcgcgatttggttctattgtgcaggcagtacagtgctttaccgaccaagataagccagggtatgcgtttattgcaattaagccaaaatctggactgcagttaaccgctgttcaaagagaagacatccaagattatcttcgtccattctgtcttgctcccattaccccttcggtaatgagtccagactacttgttcatccgtcacaatattaaagcctcttacgcgctgaataagttacaagaatctgagcagtggttacagtcaaaaattatagactcaattaatagatattatgttgatgaagttgaaatgtttaacaaaaatttcagtaaatctaaattattgacctatattgatgatactgaccattcaatcatcggttcttctgttgatattcagatggttcgtgaaattgtcaactatttcactcttcctagcgcaggtattaaatactataatactattactccgcggacgttacgttctggtgatttggtctttactgtcactccaactgcagattcatatccagttaatatcgttggaactgacccagataaaaatggtaaaggaaatatggtcattggaccatttaaaccaggtgatattaaagagaatactcatattcagccatatactgaagacgattttgatagaactactaatggagaaagaactcgttggtacaaaatcggtgaagtagattattatggtgataatatttactggagccttggagctattggagccgatcctcttcagtttgaagaccaaagtattgagctttattctactcctacccaggatatcgtcttcgcccgcgatggaacacttatcgtatttgagaatgaccttcgtcctcaatacacaactattaaattggagcctattactcaatgacaattgcaccgttcgtcaccagcttacgaattcataagctatctgcgaatcaggtcaatattcgttgggatgacgttggtgcaaacttctactattttgtagaactggccgaaactcgaaacagagcgggggaagttatccccgctgataacttgagttggtcttcactgggttataccgcggataatgattggttcgaacaaaatcgtattgaaccgcttacttattataaaatgcgtgttcaaactacgtcagcagggtttgagccgtctgaatgggttgaaacagaagagttccaaactttcgaagaaaacgcatacacatttgagcatatgcaagaattcagtttagtgaaagaattcattaaacagaagttttctttaaacaacatgtcgtatgttaacttcaacacatctgccatgatggcgtctttgatgactgagtcttttcagtttagtcctgaatattctcatttatcagctattgaaaacttcgttgtaggtgaatctggatatcatgaaattcagggacctattgaagcagtgtgtgttgataaaaatagaactatgctgggagaaatagacggaattttgtatctgtttgaaagattccaacatatggttaaagtatcaaatgataaaggacagaattggcaatacgttcagttatttaatgaccgtgtcggaaatccggtttctagagtggtaatttatcaatctaaaactacttcttatgttttaggatatgataaaatcttttacggaaggaaatcatctgacgtacgttggtcatcgaatgaagttaagtttagcgataatgaagttacatttgctaaattgggagaccagttaaagcttggctttgaagtagagttattcggaacgtatgcatcattgcctgctgacgttaccaaatatgctgaagcgtttacatgtaatgatgactatttgtacgttgttgcaaaagacactgtccgtaaagttaaattaaaagatgctccaatagatactgaccctttaagtcctacatttggtgaaaaggtgtttgaaaaggaagtatctcatataacaggcaatcctaaatctgtatgctttaaaatggattccgttggaggcaaaatctttgcccttattaccggggaagttaaaaccttaggattagacccaacagacccaaggaacgttgtggattctgcaactaaaggcgtctatgtttaccaggaaggcacaaatacttggaagcgtgtatttggtaataccgatgaagaaaaacgtcgtatagagcatttatggacttctatgtcaactgacggaaaggaaatattcttttcatcagctaattttaagacaacagagtacgctcaggatattgagcttgagacgaaatatccagaactaatttctaccgcagttaaaaatgttaatccaattcagtatcactctgataagcattatcacatgatgagtttcagagcagatgaattttcaagatgggaaacatttgttcctggacctatgaggttttatgctgaaccgtggtttgtatggatggctcgcgaaggtaacagatgctggataagcacatcagacaacgctgtagtcgtgtataatgatattctttatcagaaaagagtagatacagcagcacagggaactaccgagcgcattctttcggaagtgtgggataaaggcgacgcaacgttttattgtcctccagtttcatttaatggatttttgcagtatgcttctggcatcatgtttcacgaaccagacggaaaactgataggctattacgcatttgactaccgtgttcgtgaccaggtaacgcttaactggaaaccaactgatgtaatgtttaaggcgtttctgcagaaccaaacacgggaagaagactggacacctgaacatactccaggcttacgtgacccagatttgcgcccgtatcttactaaaatgatgccggatagttacttgctgcaagatagtaattttgagcacttttgtaagtactatctccaattcctttcagatggaaatggaacacattacaacagtctcgttaatcttgttaagaacaagtatcctcgcgaagaaaatgcatgggaatatctgtggtcagaagtttataaacgcaacatttatctgagtaaagacgctcgtgacgctgtcgtccgtttctttgaagcacgcaagaatgatttctatgctactaaaggaattgaagactcatataagttcctgtttaaacttctttataacgaagacgtcgaaatcgatattgagtcaaagaacactaccgaatatgacattattgttgaaagtacaaatatttctgacgatttagttggtcgtacgatttatactgcttccggtcgtagtaatgtgacttatatcgagagagaataccgggatggtcgtctgttatggcgtattactattcataacttatcaggacggttcattgaaggccaggaaattaaatcagagcgtacggactttgagggtattatagttcaaggtgtccgcggaaaggatatgctgagtaataacattgattatataaaccgcagccgttcttactatgttatgaaaattaagtctcagcttcctacttctcgtttccgcgacgacgtattaaggtttgttcatccggtaggtttcggtttcattggtataacattgctgacaatgtttatcaatagtggcttaaatatgaagcatgttgagactatcataaataaactcaaaaactataaatgggatgcaggactgccatcagtttatcctgatagagttgctattatcgcttcagatgatacaatagaaagagacccaataaccaatgagcctaggtattcttcacgtgctcaagctggtgaacctttcccgttacctgctaactataatcaagaaaataacaatagtgttatcgctggacaaaaccctggacaacgacgtaagccgttaagtcctacgtttgaccaatcagcagtaacgtttgctaattatcgcgatttagttaaccaacgtcttaaagacgatgcaggtaatcctcgcgatcctgaaaatccgacacaggtaaaaattgatgagtaattcaacaagagcaagttcaacgcgtagcacgatttatcgtgctatcattacatctaagtttagaactgaaaagatgtacacattttataaatcaattggtccgggaacggaccaaaacacgttgtatgtttcatttggtaaaagcactccgtggtcagataacgaatctgaacctgggtttgcacctccatacccggccgataatgaagacggtgtggttgatatttggacaaatatgatgggtgcagtcaaaattgaatcatctatgcttgactgtgttgttccaagaagagactggggagatacaagatatcctaatccacgcacatttttaatcggcgatatcgttgttgctaactctgcgccatataacagaactgatgctggatttggatggatggtatatagatgtattgatgttccaaagaatggaatgtgttcaattggtaatcttacaagcaaagaagaatgtattaagcttgggggtaaatggacgccatcaactatttccggttcagcgcctcgtgggcgtggtgatgcaaacggtaccgtcgatttgggcgatggatatctttgggaatatctatatgaaattccagccgacgtatcaattaacagatgtacaaatgaatatatcgtagttccttggccagaagagattgaagaatctccagctcgttggggatttcaaaacaacttaacttggcaacaaaacgactttaacctaatctatcgtatgaagtgtaatacgattagatttaaagcataccttgatgcaatttattttccggagtttagtcttccgggaaatactgggtttaggcagttgtcaattataactaatccgcttgaagttaagccaatgccaaattctcctaacgttaaggctgaaaaaggttggtatagcgcttctggtcttgaaagacagtcaggtgaaatgatttacatggaaaatcgacaacctattatacgttcaatggaccaaacagaagagttaaatttaattttcgagttttaattatggggagcctttggctccccatttttatataaataagactatactttgatatgaggttaacctatgtatacagataagggtaaaaaaataattgacgtcggtgagattggtaatgcttctaccggcgacattctgtatgatggcggtgtgaaaattaatgataacttcgacgccatttataacgccttcgctgatcaacgattatttgcagccggtggtggagctttaaaccaaaaaatccacgcaacaagttattatcaaaagataaaatttggtgatgctaactcggccggtacagttccgatgggttcatgcatagatgctgattgctcagaaggggcagttcaaattcgtctttcaaaaggtaaagcgggagaagctgtattcgttgtaaatagtaatggctcagcatcaaaagctagatccataaaaataacaacaaacggcgaaggtgtagcagatgcatttaaagacggatcgcgagaattgattatcaacacaccaagatgtagaattgagctatggtgcattgaagtcaaagctaacggtgctgcagtttgggattattcgatttcaagtatgtttggcagcacgtattcaccgttagaagctacatataatttaacgagttctcctattaatattcgacttggatataatgatgattactctactgttaaattgctattaagcttcagcgcaaatccaggtggtcaaaccatcaaaaggcaatcatctgaagtcatgcttatgattgacccgactattacttcatcagcgccaaacggaagagtatttgacactgaatatgcagtgttaagaagcggtgaatcatctgaaaatgaaaagatgtattctatttcatactctattaatgcgcagaaagatttaatatgcacagcttcaacatcttatggaaacgcacgtttggcagttaaagttattgctacacagaccgtaggggtatctcaataatgaaacaaaatttgatagtaggccaatcagtagatgatgggtctggtgattacctccgtaaaggtggtcttaaaattaataacaactttgatgatttatattcagagttaggtgatggttcagttccattcgcagcaggtgcatggaaaacttttaaagctagccctactggaactactttaaatgctaagtttggtcaggcctttgctattaatacccaggcagcaagagttaacgttcagcttccaaagggtacagccaacgactataacaaagttattaaacttcgtgatgtttggtcaacctggcgattaagcccaatcacagttattcctgctcaaggcgatacattaaaaggttcagcttctcctaaaattttcaatactaacttccaagatttggaattggtttattgcgcccctggccgctgggaatatattgaaaataaaacggtagataagctaactaacggtaacttaagtactgtagcgaaaaaatcaattattgctactgcgggtcagactgacttttttaacatttttgatggcgtagaatataacgaagactcgcttaatgtatatcgtcgtggtaatattttatattacggtgaaaccagcgttatggataaagccaatgctgattacggttctcctggaacagtagcaggtcaattggtagaattaaacggtaaagacattcgtttaaaagttccatgtgttgaaggggaagtaataacatttgaaaccttcctagatggaattggtgtttatcggtcttcatacaacaagttggctatccagatacgagattcagcccagactacatcccagacgattcctgggtcaatgatagtagataaccttgctactctccgcagaatcactctggatgacatgggtgtacttccaggcgtaggggtaaatcctaactcgcttgaaatttcattgaacggaaaggaattacttgaagctggaactgctggtcttcctttattttattgtgaaggcgcggaaggtggatacgcagaagactgtataaacaatggtggtcaatgggtaaattctaaccaagactatagactggaatttgactcaactggtactaacgtcgaagctattatttttggtgaggcgtttgaagataaagaccttcttaccgtccgttggttcaataataacatcggtactactatggatattgacgatatcatggcagaaaccgaccaagtgtatatgaatgctgagcaattagtaactctaaaaaatcgcattgaatacacaaattatgatgaacctaatcagaaaaatatgcgtccggttgctgacgatattatgattaaagtcaataatattgcagcgttttttgacgtaatttatccgattggcacgatttatgaaaacgctcacaaccacgcaaaccctgctgactatatgggatttggggtgtggaagctttattcacaaggccgtgttactgctggttggaataatgattcatctgatccttatttttcgcgtaacaacaataacttaaacgaaaatggtcagccatcattaacagcaggtggaacggttggagatttgacatttacgttaggaaaagaacacattcctgaactaatgtcaagagataaagttctaatttcagaccctgaacatggaagcgtagttatcggtggatgtcaattagacccagacgcgcagggaccaggttattctaaataccgtgaagacactgttgcggtaaacaacggtgtagttccaaatgacatcactaaaattcagccaacaatcaccgtttatcgttggattagggtaggttaaaatgacgattgaaactaaaactcgtgaaggagctaaagttaattcaagattagctgctttttcagaatatcgcgttgacccgcaaaatattgcggtaggaaatacggctcctatagggagcctaacctttgaacaaatggatttaggggtttggtatccaaatactgaagctgctattaatgatttgatgtcattgcagtcagcagaaattggaactattatttgcaatgacactggaatatctccacagcccgcacagcaaattacgcgtgctactttttcaggtgtcgttgcgttagagccaaaagaagacggctctgtcggtgacccagtaataattcatattcttggcttaccaattagaattgcaaacggtgatgactttgcagcagtagcaacacgttggtatgataaagtaaaagaattagaagctgttggaaaggttgttcaacaggttactcaatcgccggcaacacctcagtatgttgatattattcatttagattatcagaaccataattttgaaacatataaaaagtatggtttaactgttgaatttactattacttcaccagctaaagcaggttatgggcaatgggatgctatcggcaacgaatctaaaaccttcggcgcgaacacatttactttccactattttagaaggatgggataatggcccagaataactataatcactacagtgatttggccaaatatacgatatttgacccaacaaatacacaatggcctgttgctataaaagacgtccaatcagcgttagagctgattggtagctgggcaagaactgataccggattacctgtagcatctcctacagtagccggcgtaattcgcacagcaacgcaggctgaagttgatgctggaactattggtaatgctgcggtaactcctgctacattaaaatccacaattactcggcctgaagcaactaccgcaattcttggcttaacacggtatgctactaatactgaagccgcagcattaaccgcaggaaatagaactattaccgcggcggctctcggtcatgtgtttaaaactgtgaaagcccaagaaaacgtagatggaactgttaggttaactactgcggctcaagcacaagcaggaactgacgaaactaccgcagtaactcctaagcgtgttgtagaaatgattggaaagttcagtgtcagtcctcctagttatacctctgcgacagaaagcaacttgggattagttcgtgtcgcaacccaagcccaggtagcagcaggtgctgttcacgatggatacgcagtaactccaaaaaccttcatggcatcaaaagcgtctgacagtgtatttggtatagtaaaatttgctaaagactcagatgtggcttcagctacttctaacaatttggctgttactccaaaaagtcttcaagcgctaaaatccaccaaggataaatatggattaaccagattatcaggttctccaactactgatgcttcactggcagcggctgcaacagatgcagtctttaaaacccgtagaataaacggaaaaactcttgacaatgacataacgattactaacaatgatattaattgttatacaagacaagaatctgacgggcgttacatgccagctggaaccagagtaggtaatgttacttgggttgaaggacaatcttggattagtcgaggtgcaacgtttacatgtaatgcaccatgggaagcttctagtagattagctctaaatgttaatgtaaaatttgagcgtaacaaagacggatatgacaatcgtattttcagatttgttgtaatagttaacggttcccaatggggcggtgaacttactcttaacatcgaaaatactaaaggcggaaacaatggtcattcatggagatttgaagcttacgcatctagcaactttttcttcaataacattcctccaaatgccactgttcaaataagaccaacagaagacagtcgtattgtattttatgactgcatgcttacattctgtacaaatagaccgtaaggaataatatgaccaaactagtagattcgcttccgtttgtagacggaattccagacgattttcaacagagaattaactggataaaaaatacagagcctcttaatggggcttcaacccgctatggaaatgatggagaactgaatagagcttctgtgcagattcagaaaaatgtggttcaggtacataacgatttgaacaacgttggaactgctgtagaaaatattcaagtagatgtagaccaaatcaaaaaatcgttagaaattacaggttcttctgacgccattgagcaggtttatatcaataaaaagaatattgaagcccatagtgagaacattcttaaattagaagaagacaccgaaaaacttcgaactgaccttgattttctcgaagaggatgtaggtgtttatgattctagtaaagatgactattacagaacagttcgtgataatatagtttgggttaaacgtgaaattggtgcgtatcctgggcaagatgttaacggacagcctaagcaagacgctccaggttctggtatgaaataccgaatcattaacaatgcgtcagctatagtaaaacatgacgagcgtattcaggcgctagaagatgcatacaatgattcagacgtaggttctctgactattgaagtaaacgacctgcgtaaagaagttggtcctaaatccggagctacgtcagcttcaatttatgcaaggcttgtgaataacgctgatgctatttccgcagctaataatgaaatctttgctattaaccaagccattgattttaccaatccagtaaaaattggagctcgtactactagattagaaaacgattatcgtatagttgacgcaacacttaactctgcacaaaccgggttagttcctcgtgtcaataatattgatgctcgtttggggtcttctgataagcctgatactattgaaggaaaaattagttctctttcaactgaccaagggtacatttctgatgttgtaggacgtgatacttcatcaggacttcagggccaagtagcatggataaatcagcaggttggtattgttcctagtggacagcaagttcctcctggttcaattttagcgagaatgaccaatgttgaagggatgcaaaactcccaacaatctgctatccaggacattcaagtagaacttggcaataacagcgaagggttaaaaggttctgtatttacgttacagactcaaatgaatggtgacttttcatcagaaaatccggttcagcgggatggtgtgtatgccactgtagtagaattgcaagataaattcgtgactgcagttactgacgtagaacaagatggagcatacctccgtaaacggggcgaatggtttaaaaagccttcatcaataggtgaattcagtaaagaagatttcactgttaatttaagttctgacgcattggtaaatcctaactcattggtcgctgcttcatttaatgctggcattcgtattgtcgatgatattattgttgatgacgatggcgtattttgtgtagaaactgatacagttatcaaagcttctgattcagataaagccgtccaaattgttattctcgtcaataacattgaggtgtttacttatagcctaggtgttaaagcagtaaccggcgagcaactgttgaaaaccaagaaacttattaagttttcgtctggcgatgcaatcaaaattgtgtatagagctgcttcagaagaatcaaaagttcctgttagtattaaatcattggatattactattcatccagcagtataatgaaagggaccttcgggtccctttttcgtataaatagaatataaagaggagcttatatgtcatacaacacatacaacccaaaaacgcttaaagacgctatacttcgacgtctaggagcgccggtaatcaatgtcgaagtaactgaagaccaaatttatgattgtattcaacgagcattagagttgtatggtgaataccactttaacggattgaataaaggctatcaagttttttatattggaaaagatgaagctgacaacgcaagatttttaaatggtgtgtttgatttgcgtggtcgtaatgtatttgctgtcactcaaatcgttagaacaaatgtaggttcattaacttcaatggatggtaatgctacctatccgtggtttactgactttttaatgggaatggccggaattaatggcggaatggggtcaagctgtaataagagttatggaccaaacgctttcggtgctgacctgggctattttactcaattaatgacttattggtcaatgatgcaggatttgcttgccccacttccggactattggtataactctgataatgaaatgcttaaagtaatgggcaacttcatgaagggagacatcattgtttgcgaatgctggactaaatcatttatgaataccgacatgatggtaggtaatactgcaggttacggcttcgctggtgaacaaacttccgaccattggggcttaggagatatgtatcagaatcctaaccttcgcaataacggccaatatgcaggtgaaggtaatacaaatagagaaggtgcttataataatcgttgggtaaaagattatgctacagcactgactaaaaaattgtggggtgaaattctgtttaaacaccaagggctacaattagccggcggcgttacagttgatggccaaacacttaaagtagaggcccaagaagaaatcgagaggctccgagaggaacttgatttacttgacccgggttgtcctattctgttggggtaaaagatgactacatttaattctagtttattcgctcgccttgaggattaccgaggatacaataaaactaatgaaaccgaaattctcaatccttatgtgaatttttacaatcatagaaatagtcaaaccctggcagatgttttatcagctgaggctattcaaatgagaggaattgagttttatttccttcctcgcgaatataacaatccggatttgcttttcggagaagacccatcaagtaaattcaccaaggcttggaaatttgctgcttacttagactcttttgacggttattctggtgataacacgttcttcagtaaatttggtatgatggttaatgatgaagtcaatttgactattaatcctaatttgttcaagcatcagaccaataattcagaaccaaaggcaggtgacctgatttatttcccgatggataattcgctgtttgaaattaattgggttcaaccatatgatccattttatcagttaggtcaaaatgttcaacgcaagattactgcgcagaaatacatttattccggtgagcagcttcaaccagaattgcagcgcaatgaaggaattatcattcctgagttctctgaacttgatttagaaccaatcaaaaacattgattctcttgctgatatttctgacgtacaatacgcagaaagcgatgcaattaataaagaagcctctgaatatgttcatccgtattatgttaataacggaagaggacttgagtctcctcctaaagcagattcgtttgatgacggattttttgaataaataaaataaagatgggacctttgggtcccttaggagaaatcatgtttggaaattggtataattcgtccttgcgccgatacattgtattgctgggagatttattttctcatatacaaattgctcgctggcgtgaagacactggactaaaatatattaaagtgcctatcacgtatgcttcaaaggaaaaattcctttctcaacttgggaaatggactgctgttcagtctaccgagaataaagcaaagatagaaactgttttgccaagaatgaatttacacttggttgatatgcaatacaacgcgatgtataaaacatcacagttgaatagaaccaaatcatataaaaccccttcaaaaattacatctcagtataatcctactccgattaagatgatttttgagttggggatttatacacggaaccaagatgatatgtatcaaatcatcgagcaaatcgttccttattttcagccgcattttaacacgactataactgaactttacgacaaagacacgagctttaaccgtgatgttagaattgtattacaatcattttctccggatgaagctgttgacggagataatattactcgtcgtagattagaatggtcattgatgtttgaagtcaacggatggctatatcctcctgttgccgaggttgacggcgaaattagaaccatttatttggatttcttcgctaatagtaaagaattaacaccagaaggaaattttgaatctgtggatagcgaagttactccacgtgatgtccagcaagaaaactgggatggttctagcaaacagacatattctcacgatattcctattccggtaaatccggaggctcctggaccgagaggtgaaaaatgagtgacttacaattagatatggctaaattgctagacatcgaaggaattcccggaatagaagggcaagaaattccggtttatgaaaaattagaattagtcgaagttaaatctaatccaaatgatcgtaaacctgacctcgaagacgactattctgtcgttcgtaagaatatgcacttccaacaacagatgttaatggacgcagctaaaatatttttggaaactgcaaagaacgctgattctcctagacatatggaagtatttgcaactcttatgggtcagatgaccacaactaacaaagaaattcttaagcttcataaagaaatgaaagacattacttctgagcaggttagtactggaaaaggagctaatcctcaacaaggaatgaatattcaaaacgcaacagtctttgtaggttctactgccgatatgatggatgagtttggagacgcctatgaagcacaagaagctcgagagaaaatagtaaatggaacagactcaaccgtttaacgttctgagtgatgcacatcctttaaatgacgggaaacaggtggttattcgccacccgtctgaaatggaaacgaaaattgaaaatggagttcgtttctttaaatcgcaatgggatgataagtggtatcctgagaaatttgaagactatcttaagttgcatgggatagttaaaattcgtttgcaaggtgaagacccagctcatttccaaacgtttaaggacaaaaacaataagcgcacccgctatatgggattgcctaaccttaaacgagcaaacattaaaatgcaactaacccgtgaaatagttgcagaatggaagaaatgccgagacgatattgtgtacttcgcagagacctactgcgcaattacacatattgactatggtactatcaaagtccagctccgtgattaccagagggacatgctggaaatcatggcggctaaacgtatgacttgttgtaaccttagtcgtcagcttggtaaaaccactgtagtagcaatattccttgcgcactttgtctgttttaacaaggataaagcggtaggtattcttgcgcacaaaggctcaatgtctgcggaagttctcgaccgtactaagcaagcaattgaactgcttcccgactttcttcaacctggcattgttgaatggaacaaaggctcaatcgaattagataatggttcatctattggagcgtatgcttcaagtcctgacgccgttcgtggtaactcatttgcaatgatttacattgacgaatgtgcgtttattccaaacttcatcgatgcatggcttgctattcaaccagttatttcatcaggtcgtcgttctaaaattattatcacgactacaccgagtggattaaaccacttttatgatatttggactgcggcggttgaaggtaaatccggctttactccttatactgcaatttggaactcagtaaaagaacgcctatataacgacgaagatatgtttgatgatgggtggcaatggtcacttcaaactatcagtgcttcttctcttgaacagttcaagcaagagcactgcgctgaattccatggcacatccggtactcttatttccggcatgaaacttgctaatatggattggattgaagttactcctgactcacacggattttataaattcaaagaagctgaagcagaccacaagtatattgcaacccttgactctgctgaaggacgagggcaggattaccatgcactaaatattattgacgtaaccacatctgagtgggaacaagttggagtattgcattctaatacaatttctcacttaatcctcccagatatagttattaaatatctaatggagtacaacgaagctccgatctatatagaactcaactctaccggcgtttctgtagcgaagagtctttatatggatttagaatatgagaatgtcatttgcgattcaatggttgatttaggaatgaaacagacgaaaaggtcgaaggccgtcggatgttctgcactaaaagaccttatcgaaaaagataaactcattattcaccatcgtgctactgttcaagaatttcgtactttctctgagaaaggagtgtcatgggcagcagaagatggatatcatgacgatttaattatgtcactcgtaattttcgcatggttaacaacacagcaaaaatttgctgatttcgtggataaagatgaaatgcgattagcatctgaagtttttaaacgcgaattagaagatatgaacgacgattacgctcctgtagtgttcgttgacgccgtgaatagcgcagaatatgcgcctcaagaacatggtctttcatttgtataaataataaaaagcaaacaacattgaggatatatcatgcctttagtctctcctggaattgagctcaaagaaacgagcgtacagagcacggtagtacttaacgctacaggtcgtgccgcaattgtcgggaagttccaatggggtcctgcatatcaagttactcaaatcactaatgaagttgaactggttgatatgtttggcggccctaataaccaaactgctgattactttatgtcagcaatgaactttctgcaatatggtaatgatctacgcaccgtccgtgtagttaaccgtgaagctgctaaaaacgcatctccgctggttgataatattgaatggactatcactactgctggtagtaactatgaagttggcgacaaaattacggttaagtatgcagaccaagtcgtagatgacactggttcagttactgcggtagatagtgacggaaaaattaagtcggtgttcattccgacttcgaagattattgcatatgcaaaaagcattaatcaatatcctgatttagggtcttcgtggacaactactattacttcgcagagttctggtgtttccgctgttattactctgggcaaaattatttctgattcaacagttctgttaactgaacctgaaactgctcatgaagaaatgaccaaaaccgaattccagactgctcttgctaagtataaaatgcctggaattgtagctgcgtatcctggcgagctcggaaatcagttagaaattgaaatcgtatcaaaagctgcatttgataaaggtgaacagctgacgatttatccggctggtggaaaacgcgcttcgactgcaaaagctgtatttggatatggtcctcagaccgatacccaatatgctatcattgttcgtagagatggcgcggtagtcgaatccgcagtattatcgacaagccgtcaagacaaagatatctacggaaataacatctttattgatgattatttctccaagggttcttcacgctatatatttgccactgcgcaaggatggcctgaaggctttgctggcgttattcgtctgggtggtggggtttcagctaatgaatcagttactgctggtgatttaatacaaggttgggatttatttggtgaccgcgaagcactgcgagtaaaccttctgattgctggtgcttgcgctggtgaaacggatgaaatcgcaagtacagtgcaaaaacatgtggcgtctattgcagatgagcgtcaagattgtttagcactcatttcaccaccaaggtcaacgattgtaaatattcctctgacccgtgctgttgataatttaattgattggcgtcaaggtgaaggaagttacgactctgcaaacatgaacatcaatactacgtacgcagcaattgatggcaactataaatatcagtatgataaatataacgacgtaaaccgttgggttccgttagctgctgatattgcaggcctgtgtgctcgtacagatgatgttgctcaaccttggatgtcaccggctggttatcgtcgtggtcagattctgaactgcattaaacttgcgattgaacctcgtcaagcacatcgtgaccgtatgtatcaagcaggtattaacccggtaacgggtcaaggtaccggtgatggtttcattctgtttggcgataagactgcaactactgttccaacgccgtttgaccgaattaacgttcgtcgtctgtttaacatgctgaagaacaacatcggtgattcttctaagtggcagctgttcgagttaaacgataactttacccggtcttctttccgtatggaaacaagccaatacttggcgggtattaaagcgctgggtggtgtatatgacttccgagttgtatgtgataccacgaacaacacccctgctgttatcgatcgcaacgagtttgtagcgagcttctacatcaagccggcgcgttcaattaactacatcactctgaacttcgttgctacggcaactggtgcagacttcgatgagttaatcggaccacagtaatatgaaccccaggacattctggggtcatctaacctttagatgataaattatattaccgcacactttaatagcctctatgatgatgtagtcaatcgagaggctatataaatatctataggaaacaacgatggaattaacagacatcactcgtgcgtttgaatctggtgactttgcacgtcctaacctgtttgaggtagaaattccttatctgggtcgtaacttcagtttcaaatgtaaagcagcaccgatgccggcaggtatcgtagaaaaagttccagtcgggtacatgaaccgtaagattaacgtcgccggtgaccgtacttatgacgactggactgttaccatctataacgatgataaacacgaagtacgtaaggcaattattgcttggcaggctcaggcccacgcccaaggcaatgatatctctggtatgactccagctgattacaaaaaggttgctacggtacgccagtttagtcgtgatggcaaaactatcacaaatgaacacaccattactggtctgtggccaactaacgttggtgaagtacagatggactgggatagtaacaatgaggtagaaacgttcgaaactacctttgctattgactggtgggaataatgttatggggcttcggccccgtatcgaagttctgtgagttatttgcttaaatatctgacaaaacttcgatataaatatacttataaataatttcggagactccaatggcctttcatattttggacttattcgctccgtgggaaaaacgcgacgaagctgaatataagcaacaaatcaacaatgacctagagtcaatcactgctccaaaatttgatgatggagctcgtgaagttgaatcaaacgaaaacgaaatccagtataattcattcaaccaaatgatgtttggttccaatgaacctggaatgaaaacaaccgctgatttaatcaacacttatcgtagtttaatgaataactacgaggttgacaacgctgttgaagaaatagtttctgatgcggttgtgtacgaagacggtcacccagtagtttctcttgatttagattctactgacttcagtcaagcaattaaagaccgtattcttgaagaatttaatacagttttaacatgccttaatttcgagagaaagggcgctgaccatttccgccgttggtatgttgactcaagaatattcttccataaaatcgtcaacaccaagaaaatgaaagacggaattcaggaactgagacgtcttgacccgcgcaacttacaattcattcgcgaaatcgttactgctgatgacgctggtactaaaatcgtcaaggggtacaaagagtatttcatttacgatactggcaaagaaagttattacgcagatggtagattatattctgccggaacgaaaattaaaattccacgcgatgctatagtatatgcacattctgggctagttgattgctcaggtcaaaacatcatcggttatttacaccgagccgttaaacctgccaaccagttaaagctattagaagatgcgttggtaatttatcgtattactcgtgctcctgaccgtcgggtgttttacatcgacactggtaatatgccttctcgtaaagcggcagcacacatgcagcatattatgaacacgatgaaaaaccgtgttgtatatgatgcgtcaactggtaagattaaaaaccaacagcataatatgtcaatgacagaagactattggttgcaacgtagagatggtaaagcagttactgaagtagatactcttcctggtatgtccggtatgagtgatatggatgatgtccgttactttagaacagcattatacatggcattgcgagttcctctttcacgcatgccagatgcaaataatcaaggcggtgtgcagtttgatgctggtacgtcaatcacacgtgatgaacttgattttgccaaatttattcgtagattacagcataaatttgaagagattatgcttgatccacttcgcactaatctaattcttaaaaaagttttgtctaaagatgagtgggaagacgaaataaataatattaagattgtgttccataaagactcatatttcaccgagttgaaagatgctgaagttatggagcgtagaatcaatatgctcacaatggctgagccgtttatcggcaagtatatttctcacaagacagcaatgaaagatttccttcagatgtctgatgaagaaattgaacaagaagccaagcaaattgaattagagtctaaagaggctcgcttccaagaccaagaaaatgaagaggatttctaatggaaaattatatttccgcaattgaatccagagacctcgtagcagccaaaaaagcttttggtgcaattatggctgaacggacatctggtttaattgaagagcgcaaaaaatttatcgcagcgtctgtcatgattgagggtgaagagcccgttgacgacgaagatgaagacgacgaagatgaagataagtctgagaaagacgacgaagacgaagaggacgagtaatgcttatactgcctgaaaatcatgaattagttatcgacgctgtcgaagcttttcttcctgaagcacaggcacgttttgataagttgtccgcagcgctttctaaagatgatataaataaaattgtagagaatcttgttgtttctgagcctgatttagcaattgctttaggttcaatcaatgaatctctacaactaaatgaatttatcgttaaacacgttgattctaaaggtactattacacgtactaaggatcgtaaaacacgtgagcgtaacgcgttccaaacaactggactttctaaagctaaacgccgtcaaatcgcgcgtaaagcagtaaaatcaaaacgtgctaatccatcggctcaaactcgtggattacgtaaacgtaagaaagcacttaaacgccgtcaggctctggggctaagttaatggaaaacctcaatgaacaacttttaattgagcattggggtcaaccgggcgatgtaattgatggtaaacccatgctagaatctattatcgttgaaggcgaaaatgaatctggcttaaaacctggtctgtatattgaaggtgtttttatgcaggcagaagtagtaaaccgtaataaacgtctttatccaaaacgcattcttgagactgcggtaagtcgttatattaaggagcaggttgctactcgtcaggctctaggagaattaaaccatccacctcgtgcaaatgttgacccaatgcaagccgcaatcattattgaagatatgtggtggaaaggcaacgatgtttatgggcgtgcaagaatcatcgaaggagaccacggtccaggtgataaattagccgctaacatccgtgctggttggattcctggtgtatcaagccgtgggctcggttctttaaaagactcaggaaaaggatataacatcgtacaagaaggctttcgcctgactgttggtgtagacgcagtttggggtcctagtgctccggatgcatgggtacaaccgaaacaaatttcggaaaatacctcggcacaagttgccaatagtgctgatgatgcttttatggctctcgcagagaagttaaaagcgttataaataattatgtaacttaacacaggacatcaaaaatgcttaaagaacttttaatgaccgaagctaaaactatcgatgcttccgtcgctcttgacagtattttcgaatcagttcagctttctccggaagctaaagctaacttcagcactgtattcgaagcaacagtcaaaaaacacgccgtagctctggcagaatctcatattgaaaagattgctgagaaagcagaagaaaaagtagaagaagaaaaagaaaaagctaaagaagaagctcgcgaagagctgaaagaagctgcttctaaatactttgaccatatcgctgcagaatggatggcagaaaaccagctggcggttgaccgcggtattaaagctgacctgtttgaatccatgtttgtcggtatgaaagagctgtttgttgagcacaacgttgtaattcctgaagaatcagtagacgtggtcgctgaaatggaagaagaacttgctgagcaaaaagaagaaactgctcgtttatttgaagaagtttctaagcgtgatgcttatatcaattacgcccaacgcgagtatgctattcaagaagcaacccatgaactgactgatacccaaaaagagaaagtagtttctctgacagagggcatggattattctgactcgttttcaactaagctgaaagctattgttgaaatggtgcagggttctgtagagcagtctgtaacggaatctgccgatataaatactatcgacaaagaagcagacggtttaaacttcacaactgaagcagtcgaagaaactcctgcgactaaaaccccatccgttatggatgcttatgtagcccaagcggctcgtctttcttaatttaaaaggttatacaacacatgaaaaagaataaacttatcgaaaaatggcagccgctgcttgagaacgaagctctgccggaaattgttggcgctagcaaaaaagctctgatcgctaagatttttgaaaaccaggaagctgatattaatcaggctccggaataccgcgatgaaaaaatcgctgaagcatttggttctttcctgtctgaagcagaaattggcggtgaccacggttatgatgcacagaacatcgcagctggtcagacctctggtgctgtaacccagattggaccggcagttatgggtatggttcgtcgtgctatccctaacctgattgctttcgatatctgtggtgtacagccgatgtctaacccaaccggtcaggtattcgctctccgcgctgtttacggcaaagacccgctggctgctggtgctaaagaagctttccatccgatgtacgctccggatgcaatgttctctggtcagggtgcaaccgagaagtttgaagcagttaaagctggtgctgctctgactgttggtgatatcgttgttcacgatttcgcacagaccggtcgtgctcatctgcaggttgttgaagatttcactgtagacgctggtgctaccgatgctgctaaactggacgctgcagttactgctgctctggaagctggtaaagttgtagaaatcgccgaaggcatggctacttctgttgctgaactgcaagaagcctttaacggttctaaagataacccgtggaatgaaatgggcttccgtatcgataaacaaactatcgaagcgaaatctcgtcagctgaaagcacagtattccatcgaactggctcaggacctccgcgctgttcacggtatggacgctgatgctgaactgagttcaatcctggctaccgaaattatgctggaaatcaaccgtgaagttgttgactggattaactactccgctcaggttggtaaatctggtatgacccagactgttggttctaaagccggtgtattcgacttccaagacccgattgatatccgcggtgctcgttgggcaggtgaaagctttaaagctctgctgttccagattgacaaagaatccgctgaaatcgctcgtcagaccggtcgcggtgaaggtaacttcattatcgcttcccgtaacgtagttaacgtactggcagctgttgataccaacgtatctccggcagctcagggtctgggtcgtggttataataccgacaccactaaagcagtatttgctggtgttctgggtggtcgctaccgtgtatacatcgaccagtatgctcgtcaggattacttcaccatcggttataaaggtgctaacgaaatggatgctggtatctactatgctccgtatgttgcactgaccccgctgcgtggttccgatccgaagaacttccaaccggtcatggggttcaaaacccgttacggtatcggtattaacccgttcgccgattctgctgctcaacagccgaaaggtcgtattacctctggtatgccttctatcgtcaactctgttggtaagaatgcttacttccgtcgtgtatgggttaaaggtatctaataccaataagggagccttcgggctccctttagttgttttaatggatataaataaacttataaatccacagaggaaagcgcaatggctaaaatcaacgaacttctgcgcgagtcaactacaacgagtagcaacttaattggtcgccctaatctcgttgcattaacgcgcgcaaccactaaattaatctatactgacctcgttgctacacagcgtactaaacagcctgtagcagcgttatatggcattaaatatcttaacccaaatggtgatttgacatttgcaacaggtgcaacctatgcaggtcaaatcggagccacagaacgtgagtcaattgaagaactcactatggcgaataaagattcttttaataaagatgacatgtttaagtaccagaacgtagtctttaaagtgcttaaagacggaccgtttactggcacagatgaaaccgatgaattcggaattgtatctgaagcagtagcagctaataatattcgtatggtgtcagatgctgcagtcactgaaaaattcgaaggacctgattcagacccaatcaccgaagccagttttaaaattgataaatggcagacccaggttaaatcgcgtaagcttaaaacggatttaactgtagaattagctcaagacttagaagctaacgggttcgatgctccagagcttattgatgatttacttgctactgaaatggcagaagacattaataaagacatcctgcaatcattgattacggtttcttctcggtttaaagtaactggtgtatccgataaaggtgtattagatttaactaagcaggattctgctccggaacaaggtcgtactctgtatcgtttcatttgtgaaatgaattcagcagttcaacgtaatacttcttattctggtacttatgcagtagcatctactcgttgcgcggcggtactggcagcttctggttggttaatgcagaagaacgatgggactattccagaaaacgcatatggcattctgaataacggccttccactgtattgtgatactaacagtccgattgattacgttattgttggtgttaaggcagaatttggtgggaaggaaactgtaggttctttattttatgcgccgtataccgaaggtcttgatttagacgaccctgagcatgttggtgcatttaaagttattgttgacccagctagcttgcagccttctgtagctttactggttcgttacgcgctgtcggttaacccatatactgtaggattggacgaggacgaagctcgtgtgattaatgctgcggatatggataagatggcaggaagaagtcagatgtctgttatgctcggtgttaagttacctaagctgattgcggactaatttatgggagccttcgggctccccttttttgctataaactaaatatgtcaaacctcggggagtattcctcctcgagggatttaaacactttcttatcatatagattaacacattctatcccgtgcctgcgagctatatcaacagctactctcgtccctccagatacactcccgcatcttttctcaggcgcccaatataataccttatctacaggctcagtgcattctaggcccaatacctgcatagaattccgtgcaaataatgtctgcactattttcgagcattcatcccagtacgacgtaacttctctcgccttaatgatgcttttgattttggcctcgtttgataattcagaccatacaacaacacctgtatcaggaaagtggccacaaaagccagaataaggaataatcctacaagaatttgacctatcgtatttcgccaaccacgcttcatctgaacccggagctccacctgaatatgaaaaatgcccctcttccgagaggcgttgacctattgtagtcattagactcagaactctgcgtggcgcttctcgtgaaccaataagcgccaatctcattattctaaaacctcatgccatttactacgaatagtgttttgaattaaagtagtcagttctttcttaactacagaaggattatcagcgaataacatatcgtgaccttcacgagctgcttcgttaatgatatctttcatagtcagacccataacacgaccgaaatctttagcagttacagtaccaatatgagacagaacgttacttacacggttccaggttacatattcggaaaagatttccagaacacgcttatcagtatcagtgagttcaaccttagctttaataggcttatcagatttagctttctcgctgaacttagaattcttgcacttaatagcaacacgagtaccattattgaagaacttaggatgaaccggcttaagaacatagccttcagctacgccagtttcagaagaagcctgcggaccgaacacatgtttatttgcatgttcaaggtcagtcgtgtcaacaagctcattatagtaattgacaatagatttaaagtcatttacgtactgagatagctcagcgaatgaaccacgaccaagcagtggagctaatttaagaccaagaccagtagcaaacgattctactacataatcgtcccaatactgggtttctccgccttggtcagcaagaatatcaaacacgtagaaatctttctcaccatagtctacgcctttctgaataccgccaccggcaaattcgccgaagatttgaacagatactaaatccatggtgttcagcatattctgcattttagcgaaagaattcttgtacttcttcatgataatctcatggccaaagaagctttcaccttctaaaataggaccagtacgcttagccggaacgatttcggtaggagtaataatcacactgaagttagtgccatgaatcttctcacgagctacccactcaacagtatgcatatcaaaaccagcaccacgaatcttctcgatgaacttaccgttgtaatgattctcaagactagaatattttgcaaacattataatttccttagaatgtgattttcataaagtcagtatcaccgttacgctgggaactggtataatttgtaacaaatccttcatcatgcaaataattaagaacacttgtaatgtgtttcttaactagactactcggatacataattagctcacgcttacccgctaaagcggttttctcaatctgagttaatacttcttcttttgctgctgataattcttctgtggctacgttaatagcagtattagccattctatcggcaaggttcataatttttctctcaataaataaaataaaaccaggagtccatctattttggacaagggtaatggtatcagaggatttcccctgagcccattataccacatcgatttttaaagcaattaatatccgcttggaacaaagcgatacattaatttgtcatgtttatttcgcatgatttcaaactggtttttaggtccaacttctaatactaacggaacatttacatccattagcatccaatcaatttttccataccgttctttaatcaaatctgatattttgcgtgcgccatttttataataagtgttatcgaatattcgagtcatcatattatcaacaaatcttgatgcagaacgccaataattaatattgctcgctgcaggagcaaacttgcgctctaggaacatctcaaatttctcttctacctttttatctactttagacattataaagtcctcatgtgtttaacaagtttcttatgacgagattttataccaacgtttgttaagcgttttcgatatacaactttctctttttgtttaaaccgctcatgtgctttctcaacagagacccacagcttagcggcttcggctggagtgatatctaacgcccttgcaatttcttgaaaatcctttccgctttcatgcatcaagtgagcttgtaatgctttcataataacctcatctatgtgacgaggacataataaaccaatccgtgaatagcaaaaagggagcccgaaggctcccgaatattacggatagataatacctgcttccagcgcagtacgatgaacaatgtatccatttctagattcttgtacatcgacttctggataatcatctagcattttagctagagtataccgatgcaggtaataatcgctgtcagggtcgtcgagtttccaatctttgccctcaacagtcattcgttggatttcatccattacccaccatccacaccagatataggctgttccacggaacggtagaggatgaatatacggaagttctccgtctggctcaggggctacctttttagtaaaaacaacctcgacgcctttagtagcagtagccgggttgtaatctgatgcagaaaccgtgacttcgcaatttaaagtataattagcctctgccgattcagttacggtaattgttttaccagtttgaccatcaataacgtcagcaccacgtttccaaacataagcaatgcttgctcctgctggtgctccagtaacatcagctgtaactacctgagattgaccaatctctttagaaacagaggtcgggctcaaagttaaagtaatcgcaggcatggttttgttcttaactgtcagagtagtttctgctgaagctgtttcaggggcgccactagccggagtaacagtagcaactactttaatagttttactgcctgcaggacccgcagcaacataattcatggctgcggtaacagaagattgttttacgccgtttactgtccatacaaacgtttctgtgccttcaactgcggcgccagaagttgttgcagtaaaattggttgttgctccaatgactgccgaagcagccaaaggagcaatagatacgctataagccataggtgttccttattttaaagttacaaatgaagaattacgtgtttcacgaatcataacagacccgtttcttttgatgtaatagattaaactaaacagtgtctggtgtgctgatgggtgttcaaacgacgttggccgagatttccaatctgggttatctttaatccattggtaaatccaccatggaagggtgatatatcctgggttcttacctagcaactgcatgtttggactaaagttttcaggaagctcaaaaatttcttctgtgttaataattttaactactttgtccattgctttggagaattcttcagggtccgtgatactaaccggaatattggtaacttgtccttcatcatctatatgaataacgctgtctccaataggagcttcagcataaaatcctttatcattgatagaaggtgtttttacttcaaaacctgggtcatttacattaggggtttctttatagaaacctgggtcaatatcatgaattttaataccagcattaactggagcgtcaaacagtagttttgcctcatcagacgcttcatctttaaatactgctttaccctcaatttcatcatctgcttggattaaatcagcaattgacagcccatcattatcttctggcataggctcatcggccaatttagccagttctttttctaagtcagcaaccatattgtcaaatgaacgggtctttttcagtttaataccgaaagtttgggcatactcgtcgagcttgtctttagcttcttttttatcgagtgcctgaatttctttgatatagtctttatctagcattgggtgtgcctcatgtaatgtataaatatgattgtatttataaactgaggatagtacagtgcacgacatccaagtcaaatttaaagattttagtcatgttcatattgagtgtgatgactcaattttctatgaactcagagactattttagcttcgaagccgatggatacagattcaacccgaaatatcgctatggacattgggatggacgaattcgtctgctagattataatcgtctcttaccgtttggtcttgttggccaaatcagaaaattcgctgaccaattcggatataaggtttatttcgatccagctatattcgagcaagaaactctttcgcgggaggattttgacacgtggttagcatctaaagaaatctattcaggattaactaagattgaaccccattggtatcagaaagatgctgtatatgaaggtctagttaatcgacgtagaattcttaatcttccaacgtctgccggtaagtctcttattcaggcattacttgctcgttattatgtagaaaattacgaaggcaaaattcttatcatcgttcctactacagcattagttgaccagatgattgatgatttttgtgattatcgtttatttcctcgcaatgctatgttgggtattcgaggtggtactgctcgtgattcgaatgcattagtttatgtatctacctggcagaccgctgttaagcagcctaaagaatggttttctcaattcggcatgatgatgaatgatgaatgccatcttgcaacgggtaagtcaatttcaacaatcattgcgggtctcaccaattgcatgtttaagtacggactgtctggttctcttaaagacggcaaagctaatatcatgcaatatgttggcatgtttggtgaaatcttccgtccggtatcaacttctaagttaatggaagacggacaagtaactgagcttaaaattaatacaatcttcttaagatatccagatgcagccgcaaatgctttaaaaggaaaaacgtatcaagaagaaattaaattcatcaccaatgttaagaaaagaaaccgttgggttgctaatctagctgctaagctagcatcgcgtgatgaaaacgcttttgtgatgtttaaacatgtagctcatggtaaagagctatttgagatgattaaagctactggtcatgagcaagtttattacgtatcaggtgaagttaatactgaaacacgtaatgctttaaaggctatggcagaaaacggaaagggaattattatcgtcgcaagttacggtgtattctctacaggtatttctgtaaaaaacctgcatcatgtaattttagctcatcccgttaaatcgaagattatcgttctccaaacaattggtcgtgttcttcgtaaacacaaagataaatctttagctactgtctgggatatcatcgacgacctcggtgtaaagccgaaatccgccaatgctaaaaagaaatacacgcatttgaactattgcttaaaacatgcattagagcgtattcaacgatatgctgatgaaaaatttaactacgtaatgaaaacggtaaatctatgattaaatttgaagatatttatgaagccacaattcgtgaggctactatcgataacttcatgagtaaaattaatgcttgccagaccttagatggtctggaagaactcgagaagtattacgataagcgctctaaagaaactactcttgctgattctgatgacatcattgtgcgtgatgctttggcggggcgtagacaggctcttgaagccgattctgaagatgaagatgacgaagacttctaatacaaaaaagccccaaccgaaaggaaggggcaaagccaattggctacatcaacactagactaaattaaaagctgcgtttcttgtaattgctcttctgtgtcttcagtgacaggcaattcaatcgcataattatagcaagctccgggatgaaccgggcctttgtctgtttggacaaccaatgcttcatcgattggtcctttacagacgacacataccgtattcgacatgattgtctccttagtttacaagtttatttattacgcgccagcttcaaactgacgaaggtcaataatgtgcttaatgctaaaacctcgtgacttgatagcatccattgcatcactacagaactccaaaagaattccccaatattgcaatttagtatctacacccaagatttctttatcagcgcttaaaacagttttcatttctgatttttcatatacatccatgcatacttcaccaccaacctcgccacggccagtgtaataatccaatcgtgctttaagattttgctttttgagggcatctaatcttaacatctcttttcgacaagtcgagtgcttacgcacccatttaccatacagaacggggttattagccgcttcatactgtagtttagtctggtcgataatcaaatcattatccaattcatcctgtaattcttctaatctcattctatctccgctctactgtttctttggaaggactagtcccattatactctactgctagagttagcattactacgcatctgtatgcgtatacgttctagcgtatcagggtcgtctactatagaaaactgcacggtgacaattatagcgttatcgtcatataacggaagcacatcaactgatagacgattaatcctaggctcataattacgcacggcagagactatattacgctttatcgtatcaccagttaacggagtcatgttttcaaataattcgtttgtgatatcacaaccaaactctgggtcaaatggccgagacccctttcttgtggttattattccaagaaggctatttttaactgatcgagctcctactgtttttgacacatcagtatcccaagcaagtcgcatctctgggtcaaggtcagaatatagtttatcgatattgctcatgacataatcttaaagaattctttaagccccttaattacatgaatgtgagaaattccgcattcacaagtaatgggaactgccaattgaacctgtggcttcaatagcatatttttgatgttaactacatcttcggttgtaatagcagaatataaatcatctatttctgcatcgtttaaatcattaaagtaaatctgctcatttccaaccacgatataatctatgcattttgatatcatcattggaatgtcggaatcgtcaaaaagattaggatacttaaactttatcttgaatccctttaagtcataccagaggtcttctggaggatcgatttgcgcatgtgtataatttaacggcacaggaattttacgcccacaggtgcaattccaggtcacctcatgattaacctcgcctatactgtgagcccaaagtataactataagtaattccgattcttgtttgtttaacccagtagcattggtgcattctctgagcaatgctttaacgcattcatcgattgtaccgtttttcttcgctgcaattaaattagcgtattcttctagtgtaaaagctcggcactggatattcttgccatttattcttgtttcaaatttatatgtgatgttcatatccactcctcttattcaattatttataaatagtataaagaggattaccttatggccaacatagttagatgcgaattaccagatggtgtccaacgttttaagccatttaccgtagaagattatagagaccttttattggttagaaacgacatgaacaccaagtctgaagaagaccaaaaacagcttatagcagaattaatggatgattattttcatgaccatcctgtcgagtatcgtccttatatatttcttaaagtatttttgtcaagtattggtaaaactaaaataccagtcagaatgaagtgcccaaaatgcggaaaatacaagcagtatctttttaatcttaatcagcctccgttgacaaatccgaaagtagaggtttcaggattaacgcttaagttcaaaaaacctatagaaataattgatgatacaggtaaaatgattttagacaacattatatctgtgaaggattcatctggggaataccagtggaatgaattaagcgatagtaataaattgacagttatcgatgctatagatgttgaaaccttggaaaagattttatcgcagatgaagccgtttaactttgagctaaagacgtcatgctgtgataccacgacagtattaaaatatgataacattgttgatatctttaagctattgctacatcctgacgagattttcacattttaccaaattaaccatagattggtttctcaaggtaaatatgacttgaattctataatgaagatgctgcctattgagcgtggcataaccttatcgcttattgaaaaggaccttaaatcatgacaacacaaagattaggatatcctaatataagcataaaattatattctggatatgatgcgtggctagctaatagattcgttgaattagcagctacatttattacattaacaatgagagattcattacgcgggactaatgagggtctgcttcagttttatgactcgaaaaatatgcacacgcgtatgaatggcgatgaactagttcaaatatctgttgcaaacagtaacacatcgagaacacaaacccgaatttatgggattaaacactttacggttggtgttgatgataaaggtgatagcattatcacccttcagcttggaacgctgcatgacataatgaatcttaagttcagtagagcgttttttagttctgcgtatgaaactataaaggaaatgataggcgcgatgtatgttgaccaaccattgattgctcctcctatcaacggaattaacgcttacgtcccgcgagttccatggactagtactctcaaagattacttacgatatgttagaaacgtaggcatttctacagacaacgaccaatttatttttgcgtgggaagatatcaccggaattaacatgatggattatgaatcaatgatatcccaggatccaaatgtattcatgttcggggctcctcaaacaataggtcagtttgctgcaggattaaaatatccgttagcatgggattttgaatggcttgttaaatcaaatagatataatagaaatcccatgaaaaacgcaacgttttatgcacactcatttgttgacaaagatgttacccgaattattaatggagaaggccaaaacagcgtattcattaatagatcaggcggatattctgacatgatttttaggaatggctatgaagaagccttacgcatttctacgatggctcaatatgacgggtatgctcaaactaaatgttacggtaattttgaactaactcctggtatgaaaatcaactttgttgatttaaaggaccagttcagaactgacttttatatagatgaagttatccatgaaatatcaaataacacatctataactaacttatatatgttcacaaatggctctgcccttgaacctgtagatttgattaaggtgaaaaatgaacttaaacgtgattcttcctattaagaaaatagtaataaacgaaaagacgatatcaattccaaaacttggattaaagcaccataatctgatgaaagatgttaagggtccagatgaaaacatgaatcttcttttggattcaatttgtccaggattaacagcagccgaatccgatatcgttgtactacatttattagcatttaacaaccgaataaaagaaaccgttgttaaagatgattttacctacgatttgaataaagtttacatttgccaacgattaactcagcggttagatggtaaagaattcaaattcagagctcctcctcgttattccaaactaggttcagtagattcaattttgagcgaatttcttgaatcagtagatggaaaaccaatggatataaactttatgaagcttccagcttttgtgacaaagtgggctgatgacttagtaaacactatagccattgatggacctgaaggaccaatcaaaggcatgcttaacgtaatggaaatatttgaatgactaagaaatcagaaatgaattcaatgcgtagaagagttattgctgactcggctccacagaaaaaggctgagtctcaagctgatgctcagattaatacgctagaagatattggtcgtcgcttagacgaccaacaagcgtctactgatttgatttcggatgtaatagaaactaaatcaaacgaaattatcaaatcagtagaagatgtttcagctggtgttgaattaactgctgaagcttcagagcgcacaactgatgcagtatcaaaacttaatgatactgcatcattgattaatgataagctcacgaagcttgctgacttattatctaaaaagcatgatgttcaacaagatgtccaaaaaactggtactggaacatcattagaaacgataacagaacaagtcccggatgctcctactcagcagccattggaggaattacttgaaagacttattcctcctcaggatgacagaagacctgatgcagatttctttcctagcacagaagagcaagaggaaaaagctgagcctaaaaaggaaactgaagataagaataaaaagtttcttgacctaaaatttggagaattaattaaaatcgttaaatctggttttggaaaaactatttcattaacagataaaattagcagtatgctgtttagttatactgttagcgctttggcccaaatggcgaaaactgccgccatggttttgggtgtgataatgcttatagatttaattaaagttcattttaattattggactaaactgttcgaaaagaactttgttgaatttaacaagcaagccaaagaatggggtccgctattaactgcaataagcgagatgtcgaatgaaatagtaaaatcgttcgtcaaaggagattggggtggattagcaaaagccattggctcgggtttggttgatgtaattgataagctcggagaaaccattatgctcggaatgagtaagcttcttgctggaatgttacgcgcattaggattcaatgattcggccgataacattgaaggcgctgctttagacagatttcaaactgttactggagcagaactcgatgaagaagatgctaaaatgagagcaaaatatgttgaccgtcaagaaagagaatatgacgaacaacctgaatggaaaagaaagctttctgctaagttccaaaaattcaccggtcagattgatgacgatgaatataacaaactgctgagcggagagaaaaagcagtcagcgtatgcagacttgccagaagatgaacgcctcaaaatcatcacagctcgtaataatgctgaggcagaactcaagcgtacaaaagcatatgttgaaaaaactgacgcatctgattccactcgattagactctgctaaggatgcagtacaaagcacaaccactagatataaagaactagagaagttatccccagaggttgcaaaagatttaaaggttgaattagaccaattgcaaaagcttcttgattctaaaatatcagaacctgctccaactgccgaagctatacctgcagcagaacaacctgaggttaaacagtctgcttctattaaagccgccgcggatagtcgtgaagctgctcgtacacgtgaatctaatacacagtcacaacctatccaggttaatactgctgtaaataagaatagcacatacgtttatagaacgcctccacagacttcaacagctgctcctggaatgcaaggcgctatgaaaacctcttaaggaaaaacaatgatttttgaagaactggccgatggccttgaaaacatcaaaaaatcaggaactcgaatttcccaaggtaaatctaaactgacgaatgcgccaaccactaaggtggcgcagttcccagctgaacgctcagctgggaatgattccgcccaagatatgagagtacatgacttatatcgcaatgggttattattcacagcatatgattttaaaggaagaactactcctgatttgcgttcatttagacgagatgtaatgttatcgtctgtattcgattcaccaatgtcagcattggctaattcatcaagctctaccactagtactgcaccagtagctaatattctattaccgcggtctaagtcagacgttgattcagttagccataaatttaatgatgttggggattctcttgttacgcgtggcggcggtactgctaccggtgtattaagcaacgtggcttctactgcggtgtttgggtcgatagaatctttaacacagggattaatggccgataatggtgagcaaatttataacactgcccgtagtatgtatgccgggcctgataatagaacgaaagtgtttacttgggatttaactcctaggtctgcagatgaccttatacaaattattcgcatctatgaaatttttaactactattcttacggtgtgactggaaattcatcatacgcaaaagaagttaaagctgctattgatgaatggtataaaggaactcttaaatccgcagctccagatggggctaaagtagaaaacacagtgtttgagcaaataacatcgtttttaagtaatgttattgtagtttctaacccaactatttggactgttcgcaattttggatattctacatcaatggatggtagagaggatatatttggtccatgccaaattcagagtatccgttttgataaaacgccgaacggacatttcaatggtttagcaattgctcctaaccttccaagcacatttacgcttgaaattactatgcgtgaaatacttactcttaatagaggaaacgtttatatcggaggtattgaataatgtttactctcgaagaatttaagagtcaagctgctgatatcgatttccagagaactaacatgttctctgttgtattcgctactgtaccctctagtaaaacccaggctcttctaaacgactttggtggagagctgtataataatatgggtttagatggaaattggcttggattgacaccaggtgaattcaatcagggtataacaactatagtgacacaaggaactcggcaagttgttcgtaaatcaggtgtgaatacatttatgattggcgcaatgactcaacgtgtggtgcagtcattattaggagaatttacggtaggtacttatctgctcgatttctttaatatggcatttccaacagcaggattgatggtttattctgctaaaataccagagaatagattatcatatgaaatggataagttccataacgctcctaatataaaaatcacaggaagagatatggaaccgctggttctttcatttaggatggacccagaagcaagcaactaccgggcaatgcaagattgggtaaatgcagttgaagacccggtgactggtctgcgaggattgccacaagacgtagaatgtgatatccaagttaaccttcatgctagaaatggattaccacatactgtatgcttgttctcaggggctatgcctgtagcgtgtggagctcccgaatttacatatgatggagaaaacacgatagcagtgtttgatgtcacgtttgcttaccgtagcatgcaaacaggttcggttggaaaacaagccgctatggattggttggaagataaggctattcagaaaattgagacgattaatccaaatcagggcttgagtgcgtctgcttcaagattgtctcgtttaggcggggctggtggtggaatttctaatatcactactacgacaagtagaataatttaggggccaaatggcccctttgttttatgcaatgcagccaataaaccctggctcagtgcgaagaagtttcatttcgtttgtggtccaaactactttaacaggaatgataccttctgcctttccattaagaacggcttctacaaacgatggctctgttggcttacggaagatgtcttggataagaactgttggagtaccttcgttaaacccttcaagcatgataagcacttcttcgttaaacttctctgcgtctttaacatcagcagaccattcaataccgttaaagcggaatacatgtttcatatcaatttcctcattggtttgtgtaagtctatagtatcacgtccttgtgataagtaaacaactttatgcaagtttttctgggataccatccaagttgatagcaccagccagtagctccatggtacgtgtgtagctaaccttatctgtagaacggtctggagagaaataaatctcgtttaaaaagcctttgaacttgctttcttcaagaggttccactttgccttgttccatcaagatgtcaccatcatagagatgaaccgattcatcgatttgctctggcggaactaccgtcatttctaccatgaatgtcttgttattcgctacaccaactccatttctaaaaggagttccccatactttgttgactttcattgccaacccgcgaggaagaataacttcagcctcatcgctaaagcttgacaagacacctgggataactaccttaattttatcagcaccgtgaataatgaacccaaacttaaactcatcaccataggcaacttcctcgcctctatcaactctttccaagttgtctgttccaataacagaagatactgcatcgatagttgtttctttgttttctaaatcagagctaggagcatctggcattaatgaatcaccagcatttgaataagcaccaaagataattggacttaacgaagtagaaacatagttctggaaataaaacattttagactcaatgttatctttaaactcttcgtattttccgcgctgaccacgatacaaaagagtgcccggttcaagacgcaaacctttttcaaaggcagaatcgagcggacgaattttcttgtcaataattggatcgcctaagctttccataccaataagataattattaacaaatgaataaccagaaccacagtaatggtgtattgcatctctttcttcttcgcttaaacgagattgcatttcacggttatattcaattgctttggatatagaatcgccaacaattgacacataagcggatatcatataattgacaagattttggtattgacgtaaagctccgaaatcgtcagctggaggcatatcaaatccacgagtagctacttcaacgattttacgcattgtttccatagatgccggatttttagcttgagcaataacatcagcaacgtctgaaattcgttgttcagcgattttcattttgtctgatcccgaaggaatgaaaaccttccagtcgtcatgcattctagacatttggcctacaaataatctctcaactgcatcaccaaaattacttccatatccgccacgaacacgatagtgcttgatatcatcaacataaaaaggaattgatttttctaatccggctttgatatctttttggaggtctaccgtatcgccttctgcgtttagtactggagtgttagtagttaattcataccaacgttcgcgtttattttctggccaatcttcatcaacatacgaaacgaatttgccgtattgtgctcggattaaatcttttcgagacactttcattttactcattacagcgagttcagatttcttgtcttctttttcgccaatggaattagccaatgcttcggctttggtaacgttttcgccggtttctttagacacataaatttcacctactttggattcaacctttgtgtataactcatctgaaatttcaggaattccttcaatctcttcaagcttcttgcccttgcgaaccataatagaataagcatacttacctttatagtaagccatatctttcattagattgaaccgaccgccggtgcgagtagtaatcaaccgagcaagaatgcgttgaatggctttatcctgtccttgcattttcttcggattaaagcggaacattaccgcatcagctttaatttgcttaactactttgttgacggtctcaaaaatggtattgatagcaccaatagggtcttgtcctaacccacccttaagggctccaatattacctttttctgacacagagaaaacatatacctgaatgaatttatcacccattttgatattcttaactgcatcaccttgacctgacccttgtactaaccgaatcattaaattgttattacccggcaccttaatcaaaaagacctgaggcacctttagttttggtttaacgttctcgacaggatagattttactattctcttcatcgaaaacttcatttaaaagttccatgacatatcctcgtttgtttattctatttatacgaaaaaaggcccgaaggcctttaattaattaattattgttactgtacgccaaacctgtaatccatttactgattcatacgcttcgatgttttctttgaagtttcttaatgtattaatgttattaaactcaagaacttctgtgtgaacagaaatacccccacgtccgtcagaagatttagcaattacttcgtataatactttcattttattcctgttgcctcagtaaagttaacaccaaacgcggcttcgaatgtattagccacttctttatcatatctacgttgtttaatgataggtaagaataaccctaccgtaccatcatcacggccttcagcagttacccaaccattacattcaagttcccagatagttcctggaagagaatctctaattttccatagatgagtacgatcaagttcatgtaattcttcaggtttatctttaagaccagagcctgcattaactcgaatacgaccacattctgatacgaacattaacccacccattttaccgggttgtttcctatgctcatatgaaccgacacatttcaaatctacagtgataacctctttaaatttaacgaggttcttagaacgcttatcttcccaataagcaccgatatttttaaggatgataccttcgagaccttggtctacgtatgtcttatagatagcccgagcttcatggatgttatgtacgacatggttttcaattagaataaccttgtcatagcctttgctcatcatttccagtgcacggaagcgtacatcataagcaaatccaggaactttaccttcggaatatactacatcaagcggaacataatcccaaacttggaatctcataccttccgcttcttcagcagagattgttcctttgattgctttattagccaatccgtttgattccgtgcgagccgtctgttggaattccttagctttacttagctcaggaagctcaggctctttaaacatgtcaaacaggtcgtttgtttcttctttcacttcgacatgatataccaactcgccgtcaatcatcacaccgttaggatggcgttctcgggcttctttggtcatctcgataagttgacgcttaagtttatctagacccaggtattcattgccggaacgagtaagaagagttacatcatctaaatcatctccgcggatttcagcgaagcatcgagctccatcggctttaagctgagcaaacgcagggaacttaatatacgatagcgctttctcagaataagctgatgctaacatctgtggcatctcaggaattaacttcttccataccttattagcaatagaacctgaagcgccgcaacgcatatctttaagaagaacccgtaccagtacactagcatcaccctcattcatcttagagagcaaatctactagcccctggattgccatattaccagtaagtactcgtgctgccagaatgtcttggaggtaatctagaccatcagaaaacgtctttgaaggaacatttggatatttaacgggagtatattctggaactttcttaataaagaatttaaatcgcccggaatacgccagcagataagctcgttttaaatcaacgttatctttattgtcaataagaatttgggttttagctttagaacccttagcatcttcaattgctttgatgatatcaaaaatcattattcacctaattcttctgaaagttcgcttacgctacgatgataagttaatccatcgatataaacaaacccgttattgatgcattcattccaaatcgggcacgcctttgcttcacgccaaattggattccaacgataaaactgattaacatggccataatcacatgataaccaacgtttacctaccttagtatgaactacaaacatatttcctcctagggtatggctattataccatacccagtgtgttagcaattaatttgatggttatcacatgtaatacgaccgttattccaccagtcgtttccaggaggaacatgtgaaccaggtctaaacggaatgataggttgtttccaccaatctcctggaacttgttgtggaggccaattaaaaggatgttgctctttacgaatttggtctttgatagcttcttcccacaatccagaaagagacttctgcggtttcttaacggatttcagagattccaggcaagttacaatttgatgccaatcttcaaccataattccaggagcagtcactgaaccctctcgctcaccacgaggcatatagaacacacgggtttcagtgtcttcaaatactttgctggccgcagcaatatgtttaggcaaatcgtcaacataacagacgatgcgatcgccgtattttactttagccttttccagtaaagcatctttagattcatcataatcacagaccatgatttctgtaaatgcatctgggaataatgcgttcagattaaagcgacgattaaggttagcatctaccgaattgccaagggccgtgatagcaacaaaatcgtatttttctttgagcttattaactgtagctaaagcatcagcatatggagcaagataacgaataaaatcgctgttgttgtacttcagaagcagcttaacagctaattcttcttcacaatcaaacagctcagcgggtttaatgaatttttcagtagtcatcatatcaaggatatgctctaccggaaggttatatttctgggcaaagtaaggcagaccactttgccatttaacgatgattccatcaacatcagtcgcaattacaggttttgacattcggggaaattcctcaatgcttgtttaaatttggcgacgctatttgcggcaccggtgaaattgaaccagattaaccctggagtgtccgagggttctatatcaattaattctatattataatactcagcagtctttagcatttccctggtgatacgtcgggcaaccatatgaccgaagtgaggattaatagacatcgtcgttagcagcccttaactgagtaattggataaagctcggattctgcatggattgaacgattgccatcaacccaattaacttcataccaaggttcaaccgagtaggctttaatggctggagccgtatcacatacaactccaggaattccatttgctaatcttactgtactgaagatatgatatttcatgcatcaagtctcactgtccattcaggcaattcaaagaaatccggagcatcaatttcatactcaacggtgtgttgtttaacgttagctgacatgatatcaaccattgggtggtttttcaagccgcaagaaaaaataccagctttagatttaggcacggatacaatcatgttaatttcctcaaaatttagttatgaatttttctttcggcattttggcatttgagccatcaccgtcagaatacccaattggcacagtttcattaataaattcaattttagcatttataacattaatgctcagagaatctacgccatcaaccatacgaaattcaggagggcaatacttatcaatgtatgctttcacgccatttttattagcaggtgtaccatcgcgagtatcgctgataatggtttcaacctttttctttcgtgaatcatagaaagctgatacaatcatttcaatttcctcttaaaacggacgaatattaacgtgaactacagggatagcaaaaggctgcatgattacaacttttgtgtctttagttgcattcaggcgttgtacttttgcaagattaacagcttcttcctttgttaatccacctttgtaggtatcatttcctttatttgaggtccaaacaccccaatcattgcttccgtcatcggtcttcggttcaggttctttgtgggtggtttcttcaaaataatgctgaaactcttgattagtaataatacaccacatatgggaaaagcgaacttcatctacactaacgcgtttgtattctccatctggcttaatgatttcaaattcaactaatccggtattttccgcatatttaaaggttctggtaattttaatcggattattaccgatttgctcaaaaacacccttgataagagcgcctggagacaagattggagtctttttaagcttatagaatttacctttttccattatcatttcctcaatagtggggccgaagccccgagttagttaaaacttgatttcgtttgaaacgatatcccagattgcttcacgttgttcttcagttgttttacgaccgaggatgtggcgcagataaattttaacaagcagctgacgatttgtgttccaagacggatgtgaagataaatcacgtttacgaacttcatcatggaatccaactttgatttcagaaccattgaactgaatatccagagtaggaccattttcaaagctgaagaatacgtagttatcttcccagtacatatcgatttgagctactgtaccgttgttgtgttcccaaagcaaagtagtagaaacatcccaagcattgttctgtacatatttgcggttgaagttagtgaagttcattttattctccgttgtccgtttgggtggtacaggtctatagtaaccttgttgaacttagaagtaaacaacttttttcattctgtggaaaataaaaaagggactcccgaaggagtccctgaacttatgctttcggcttaccaaaacgagaagcatcatcgcgaagaaccgcacgagcccgacgcatgattttctcaaccgtctgattgatacgcttgttcgacccacgcttgtagccagcgcgtttagaggtaccaacaacttcttttactgcagtttttgctttagcttgtttagccattttatcatcttccattttggagaaatacatgggagcacgttcttccgaggttcaacttctttcgacagttctttcggttgtagctcccgcaagccctcaaggggtacgtttaaactcttatctgttgcacaccgttagcttaaaggttccgggtctgatttctcagggataagatatacaccgatggatgtataggccttgaggcgtactcccgattggccatcgcctcggggtagcatgcacttgccgtttattttctagctgcactttggtagcaaatcaccggtggtttcggatgttttacgtggggataaccaacaacgtccacatcatacgttacccatgcgtacacatggtgggcgtacaaattacttcagcgttaccacaaagtggcgaacagctttgcgagcagcagaaccaagatgcttagcatacttcagttcatccatcgcttctaaagtatcacgaaattcagcttgtgctgggttcaggtgtttaaaccctttcagaacttccagtgcttctgcatagatatcgattgaagcaccgtagttttcgtgaccggaattccatgcattacgttggagttccagagctttagtaagttgtttgttcattgaaacattcctcaaatgaggttaaaatttggtggacggtaaccgaggtttagctcgggcatccaccgcttagaattgctcgggtaactaatttccgacgcccaattcatattattatttatatacgcacgccagggacttataatgacaagtcacaaacttctgccggatttctttaggtttcttcacacctgctgctaccaacggatgaggtacgtttctgatattaccaacaggcagtggagtcaaatcaccgacttcaacaaatcctttcggtacatcatcaccgatagaatagatttcacacatatccggcagttgtccttgttcttcttttccaagaataataccggaaggagaaacaatttcatcaccttgctgtgcaggttcagatacgagaattacatactcgcctagagctttaattggaagttccatgtgttacctttattgtttgaccatgtagttatattaacatggtcagtttaaagcaaattacttaccgatcatctgcagcagatgctcaactttcataccatttaccgagataagtttatcaaaggtaaatgagcgccaaccttctttctcggtatcatataccggaagtgaagtagtgctttctgctcgagcagatttagtagtgctttctaccaaatcagatggaataatgtctttatcacgagtacagcgcagagtacgaatagtgccatcagctttttcaaacacaatctgggattcgcccatgctcagcacagccttcagagtttcacgaatatggatgttttgttcagtagtcagtttcattttgatgtctctttaatagttttgataattacagatttgcgcttggataattcttttaataatcgaactgcttgatcttcaaatttaaatgttgctaatggtttccatttaaaccaataccggcgttctactgagtatgatataacaacatcaccgcttaggttaagtttattaatttcaacaattctaagtttcattattcaattccacagaattctttaatgttataccaattcaacttatccaaattacgttttggaacattgaacacctcgattccagcagaacgaagaatatcgtcccaaccgggttcgttcttgtcgtatgtttcgcagtatactaattttttaataccagactgagcgatggcttttgcacaatctggacatggagacagtgtgacatacattgttgctccatcaatactactgccgttccgggcagcaaaaagaatagcattaagctcagcatggatttcattgactttagaccatgcagagtgggctgctcgatgttctttgagcaatccgacttttttgacttggaatccgtcttgacgcaatcctgtagatttgtaaggaatttcaccaatccaaccttgttctgctgcatggtcacaacagttcacgccgccagaaggtgaaccgttatagccagtagaaataattcgtccattcttttcaattactgcgccgactttccacgagcagcattttgactcttgagatacgagatacgcaatttgtagtactgtcgacgctttcatttaaatcaccagataagttgtgttatttgttttaaccaattttaactcgtcggtaggagaagcaaaactctctactcgagaagtacgaatgcctgtaccatctggaaacggatgatttcctcgttcaataacatcggaaaagacatagccataaagaggttggccttccttaacatcaacgttactgtacaaaatagcatcatattcttcgcgtggaattgaccaaacaccttggtcagaaccaataacagcattaattagacgaataccattttggctaatttctgctttaatgccacgagcatgttcaactaaaagagcttctacagcctcacgtaaagtcattagatatgtcctaaaatgttagtcatttcaacttggcctgttccggttaaagccaattgagtgtgttgattgctctttccattattaactgtaatgatataagcatcaacatagttaaaggatgactctcgtcggagagtcactttacttccaggaaccctgtttgctacttcctgtgcgaagattttaaccttcgaaataaattcatcatgtgaaaatttagcgtcagacaacataagtcataacctgttgggtttcaaaattagcaataattccaacgataaaccagtcgtgttcaccttcgccacaagaaattttaacttcagacgaaccgcctgaccggtcaatagaaaatttaataacttcgccgtttggaataagtgcattcattgcagataaaaactctgcatgcattttggctacttcagatggagtaaactcatctgttaaatgattagcaacaacttgcgtaaatgatacttttactacttcggaatactttggaaacattatactttcctctaaaaatcaccgtgggctacttgccagcattcaacaccgatacgacgccacatttcaactacctgcgccctgtcatctactgcaagtttgacattataacgatcagcaattcggtcccagaagatttcttcttttaccacatcgtctttgcgtgaatcgccttgcttacgttggaagtgttcgcctgtttcgccaacatggtccaacaaccatttcttcgtaatgcgttgataaacagtagggtcttctttagtaccagactctctgccggaaacagtaagaattttatatcctttgttacgaagcattttaagaaattcaattaccatttcctttggatggtctttaccacatttagccaagtcataaggagaacgatgattgttatctgctaacgtgccgtcaaggtcaaagataactgcttttggcagtgattcgtctggaatgtacaaatcatatgggtgcatcttagaatagaagctacgaagcacttcaataggaactgcattcgcgccacgatagaggttacgattaagcaattcagtccaaggaacgtcaaagcgtttaatttcccacttgacaccatcaatttcgtatgccaactcttgccacttcttgatagtcgttggattaaggttagtatcagcaatgatgacacctttggtggtttccatctcaagcagagtcttcgccatagaaaactgacatacagatacggacttctcgcgaagcttagaatatttgtaatcattacgtttatcaaggccaaagatgccttcacgcaaatcatcacgagacaaaacataccaaccgggattagctgctacgtattcgttagcccaggttgttttaccagagcctggagccccttgtgtcaaaaccaattttttcattatacatccttaagagtgtcaataaaatcatgaagagccttagacttttcaccccaattagcacgatatttttctttaattgctcgcaatggcttattcattgacagtatatcatttttgtcataattttcagctgcgcgtccaaacacgatgcacgccaattcattttcagcaattaaccctttaagtgtttcatactgttcttgattcactacatcaccattttagaaagattgcgatgcgccaatgagcgacgctttccatgtttcttcaaaaaattgttaacttcatcttgctctacaccgccactttctacaaattggagtgccttaccgaattcaattgaggcatcttccaattcagaaattgcttccttcagtgcctctttacgctgaacaaactccaaaaaatcgggatacataaattctgccatgaatagtttaaaccacacatcaaatgaaattcgtgtttggtcattaagctcaaacactctttcttttaaagctccaggcacactaacacggactgtataaacatatccattagaaatattttctggtacagcaatagctttcttaacaagaggagttaactggcacgatccaacagctagcatattcctaagttgtgtctttttaatcgataaaagatgtgatgcgtcttttacgaagtaagtatgaaggtgtgacggttccataatattttcctcttatttagtttacttaacgcaacgaggttctttaaggtcagaacgataataacatatcattccgttagcatctttagtataacgtaaaatgtcattcatccagatgcgatactcttgcgactcttcaaatggcatacctacccaggctttaccgtcaattacttttacttcccagtgtccttcccacttttgaattgggtctggccaatcaggatgcaaaaccgggacatccggtgcactagaagagcatccagcaagtaagctgataatacccatggctaatagacttcgtttcatctggtagcctcctggatatcttctgcaaacttattgaagcttgcattaatctgtttttcaactaacccaggtttagctgctactacatttccacgcttagaatctttattcattttagcgttggaagtatcacgagctgctcggttttcctgatagcctttatatgttgtctgcagattttttatagaaacaccgatattttctatttcttttgcttgtcgatcagattcatcttggacgactttgaggtcagctttaagattttctacccgccatgaaagatatttcaatccgcctgcggataatgctaacactccaatcatcaaccaagttgtgtttattttgagcatagtttaaggataacctctacgatatcatcacgggataatcccgaaatgaggatgtgacgatcagaactttctgaaggagaacacttgaagcaagcttctacatattctgccatctcagaataattcagctcgcgatgcataatgccaagacgatgcttgccataaatcgggtcaacgattacatagcatttgcatccgttagcatgaacgtttggctgggtgatgttcttgaacacctctgcaccatacttcgcgagatgattatctaggaaatcaatcatttcatctacggcttcaggaagggcttcggcacgctgctcgttcacacgattagtgtactctttttgcttcttacgagcagcttccttgcgcgccatgtgcgtccgtaggtcagtgacgaagcccaccttcttggtaccattccacacaaaaatcccatcagaatgagtaccatatttgttaacaaccatatctaaagtaattgcttgcatatccatttcaatatcctcatcagttgatataagtctatagtatcacactctgatgaggatgtaaacaactattcttcagaaatttcaatttctttttcgtactcttttggaacatatcctgcccagtacttcaagaacaccctttcgaggtctttaagcagtttatctacatctacagttccttcgtacatgttcatgataacaccaaacaaatggcgctgattaaccgtggctttctgcgcagcaatagcataatctttacgagcacgacctctgtattcatcgtagaacgactgacatagctcaagtgactttccgaggtaatctagataagcttgctcaaatgcagaaattttcttaattgcatattcatctccagcaaaaagagaacgcaaatcgtcggaatttgcagatacgacagacgcaaacagtctttcatttgacgttattgagtctttagtgtgatgaagagcagaataccattcggttttaaccttaaatctctgcccagtgtttagaactgcaatgtacccttctacgccttcaagttcacgaacaccttcaacccaagtcgtggggtcagaaattccgtaagcattgattaaataaggacgaattttagcattagcgtacaaatcatcatatttaatatactcgccagttgtgttattacggacgtttaacacaaacagctgtggctcctgatatgctaaaacaacacgattattaggtgaaacaaattccatgtttaccgtataaccatctagcgctagctcaagaataacctgatgaagcgaagaatattcttcactgttaagcaaagctgaagcttgtcttgcctggtcactgtagagagatgtttttgacttaaggtatagatacccatcatcgacataagatgatactagagagccatcagccttatccataatgtattctacatcgctaatatcaattcccatcgttaatgggttttcattcaaattaaagaacttttccatcggacgagaagcaattcgaattggggtatcgccatccatctcaaacatgataccccggcactcaagagcatctggttttaaccactcactgtagcttgcatagtgatatgaaaacactctgaacttaccatccataggaccggtaaaatctttataaaagaattttgcaacttctgagctttcacacagattcattaaatttttatatagctctaacatttctttaccttatgttgtatgttccatggaggattgaactttttaataaacatcggttcttccaagtccatagtggatattgacatctcgccaagttcattattaatcaaaagattaaaacactgacgagcatagaactctacttttttaccagccattagtgcttcaaaaatcttggcagatttagccgaatcagaggtttggtctttccgattaatagcagttctataataatttatacgtttacgaagatttttagtcttaccgatgtaaaccagctcatcatcaactgcgatggcataaactacattcaacttgtttgctatcaaaattggtttgatggtaaaatctggttctaactcaagttgaacatattttataaaagaaaactcgttagcaatatcattcataataaagaggggccgaagcccctttccttataagtactttttaaatccaattagaacatcatcagtgacatcattgtcaatctgagctaccagataagaagatatctcaacttcctgaggagcagattggactgcgtcagagttaaggtattcgcgaatccatggaataggatgtcgagttggtgcatcagtaatcggacaaggaagaccacaactacgcatgcgagatacagtcagatagtcaatgaagtcatgaagaattttaacgttcagtcccggaagaccaccgttgcggaaaagatggatagcccagtctttttcttggcggttaacttccatgaagattttaattgcttcttgttcacactctttagcaatctcaacccattcttcgccatcagtgccagtttgaagttgacgcagaatgtactgtgtgcccttcagatgaagttgttcatcacgagcaatgaacttcatgattttggcattaccttccatgatttccatatttttatggaagttgaaggtacatgcaaaactaacatagaaacgaatagcttctagcgcgttaataacatgtaagcaaagataaagagatttcattaaatcacgtttagcttctttaatttcgatattatcttgattaaagcagcgatttttggcattttcccatgcgcgagtcttcgctataacatcatcatagtaaacaccaattgactcagcgcgtttcatgattgcttcgtcaagaacgatttcatcaaagattttagctgggtctacatataggttacgcatgatatgcgtgtacgaacggctgtgaatagtttcactgaacgtccaagtctggttccaagtatctaggcttgggtcagaaataagtgcagataaaactgctgctggagctcgtccttgaattgaatcaagaagagattggtacttcaagttatcagtgaagatattgcgttgatgttctgggagtttttcaaactgaccacggtccatcataacgttaacttcttcaggacgccaaaagaaactcaactgcttctcaatgagttcctcgaatactttatgacgctgaatatcataacgcgcaattcctagaccagaaccaaagaacatcggttcggtcatgatatctacttgcttggtattaaaaactgtactcattctatttcctattctgtggtgttaaccatccgtggtctaattataattcccttttattaaagcttacaagctgcgcagtcagcagagtcttgaatcatatcatcgttaccggaaccatcacgggtgttatgatagtaaagagtcttaccaccgaagtaccagaaataaagcaggtcgtccatcattacagacatttctactttacctttcgggaaattcgcagggtcgtaataagtattagcagagatgctttggtctacaaatttctgcataatcagaacctggttcagataaggcttattaccctgtttcgcgagctgccaggcataatcataaagggaagcattgtgttcaacatttggaacgacttggttgaagcttccttcttttgattctttaactgacactggtccacgtggtggttcaataccgttggtagagtttgatacctggctagacgattcgcatggcataagcgcagataacgttgaatttcggataccgtatcgcttgaggtcttctcgcaggagttcccagtcacagacatagtttggagctgcgagttggtcaattctttcgttgtaccagtcaataggcagttcaccacgtccgtatcgtgtttctttgtaaagcgtgcatggacctttttcgctagcaagtttaacagaggctttgatgagtgcatattgaatacgttccatcatttcgtgagtaatatcattagcatctgcgtatgaagcaaagttgcttgctaaccaagctgcatagttagtaatgccaacacctagtgctcgacggtctttagcttttaacgctttgtctacaggatagtcttggtaatccaaaaggttatccaaagcccttaccattacttctgcgatttcgttgacttcttcttggtcttgccagttgaagttgtcgagcacgaatgctgcgagtgtgcagagcgcgatttcgccatcttcttggccaacatccgaagttggtaacgcaatttcgaggcagaggtttgattgcttaaccgtagccacatcacgaataaaaggaccatattcaccaacgttatctaccatgtacgggtaaattcgagcagtaccagcacgttcagtaaggaacaactcaaacagttcacgagctttaatacgtttctttcttatatctgggttcttttccagctcttcgtataaagtacggaacgcttgtgcatcacggaagtattctgtgtacagcgtgccaagacatacatcgggactgaacaatgtgatgtaatcattcttaatcaagcgttcaatcattaggttattaatctgaacaccataatctaaatgacgaatacggttttcatctacacctttgttgttcttaagtacgaggaggttttcaacttccaagtgccagattggatagtacagtgtcgccgcgccaccacggactccaccttgggagcaggatttaactgctgtttggaagtgcttccagaaaggaataactccagtatgtttgacttcaccgaatccaatttttgaaccttctgcacgaatcatacctgcattaataccaatacctgcacgcttactgatgtattttgtaattgacgcagcagcttcattaattgaattaagactgtcgccgccttcaataaccacacatgaactaaactggcgtgtcggagtacgaacaccagacataattggagttggcaatgaaatctttttagtagaaactgcatcatagaaacgaataacgtttgctaaacgattttcgccatcgtcttggtgcaagcacataccgatcagcataaaggcaaactgtggagtttcatacaattcaccagtgtgacggtcttttacgagatacttctcgataagctgcattgttcctgcgtaagtcatagtgaaatcacgctcatgcttaatataagaatcaagcaaagtaatttcttctgccgaccatttgctcaggatttctttatcatacttatttgcgttaacacaacgagaaatgtggtcaataaaagcaggtggctcaaactgtccataaacacgcttacggatttcaaacatagctgcattagacgccacatattggtaatccggttcatcaatagaaatgctattcgccgctaccttaacgatagtcttttggatatctgcagtgctcatgccatcacgtagatgggatttaataatttcatataactcgtatgggtctactttggttccttcgcacgcccattcgaggactttaatgattttctgcatgtcaaattcttgactaacacctgagctcttaattacttgcataagtcctctaattcaaatgtatctttaaaaagtttattcactacaagagctattatatcaccatggcaaggaagcggtttgcaggtgcatcctaatctcattcctcttaaagtttctaagtgctctcgctttatttctccgttccgaatcttagcaataaaatcgtccttaaacgcagcaatagcatcaggacgattatcgcaatctttaccgacgtaatttccccacattgttccgcgttggatatttacatcgaagtcggaatggtatttattaaccacccgacatatcttcatgttatatcaacttcaaaccaacagattaattgtgttttgcctatagaccattcatatgatttaacaatagacagaaccctttgttcgatcccgtcaaaaactatcttgtcattaacttcaggcaaatcactagagaatgcatcacacatctcgcctaatattgtttgtcctttacgaacaaatcgaatattcatatcgccattttccccttaattgttgagtgagattcatatccaactaattcaaagtggtgtggacgtgcaaactgctctaaccaacgaacctgagaaccagtctgccatgtttcatacgtatccggaaatgctattttaagttcgcataactctttaggttctcggcggagaatttctttgcattgctcaatgtgattcatgtaaatgtgagtattaccaccagtgaataccaaatgaccaggtttaagattggtcattttagcaataacatgaatcaatgccgcgtatgacgcaatgttgaaggggaggccaaggaatacatctacagaacgctgataccattggaggtcaagatgcccctgacgaacgttgaactgataaagcagatgacacggcggtaatgccatcttatccaaatcaaccgggttccatgcagtcacaatctgacgacggtcatatggaagttgcttaatacgatcaatgatcaatttcagttggtcaacacccatgaaatctcgccattgcttaccatacacaggtcccagttcacctccggaataccccatgtcttttgcctggttttcatagttgtcgtcccagacagttttaccttctagtaatgaaccatgctgaataagacgcaattcatggacattagtagacccacgcaagaaccaaatcagctctgcaatgcatgctttccatgcaagacgcttggtagttacagcaggaaaccctttttgtaaatcaaaacgtaactgagtaccaaacttcgcaatagtgccggtaccagttcggtcatccgtctcataaccgttttcaaaaatgtctttaattaattcttggtattcacgcattaaatttttcctgaagaggtgtaaagaaaagctggtctccacgcttttcaaatcgtccaataatagacactacatcatctttgaccatcacattgccatgtgacattccgatgaacatcttcttataatcacgttcaatttcaataggtatatttccacttcggttatatactgtagttgaaccgttataagtgctaagaccattataactgaaaactagaagatgaataccatgcttaaatggaaatcttttccacctcttttggactttgtcttctgatagctgagtgatatcatagtttgcgctcatagaccacctctgaaatgttagtcacttcatcaatatgataccaatgattttcaataactttaaacccagagttttcataggtcggagctaccacaaattcaataggtagagtgacatcagaattcactctatgactttttctgatgattgtttgtataaccttatctgcatatggatatgccttctggatgattccggcaccgcctatgatagaataattaaggtctctattaaaagtgatagtactgttgtaagaagtatgagcggccataatgtcaccacccaagaaaccgataaattcttcttcactaacatacgcgtcagcaaaaaatccgtttttagcagttgccaacgcacgactcatgtcttggacaacgattgtcttacgaccaggaagaggtttaggaaaactcatgaaagtctttgctccgcaaatcaagatagtatctcgagtacgattagcaaagtttttcatatcctgggaaatatgtttccaaggaagaccatcgcctaaaccaaaagcattttcgtttttgccatctacagtttttgtaggagcaaaggcataaactatttgaatcatttaaacctcagcaaaattcaactcattccacacttaaaacaccggccacctaattgccataggctaccaccacagtacttacaatcccagtcagttaaaatccacatgacttgtacccactagctttaatcatgttctgaagagttttaaatccttcttttatggcttctgaaatttcctcaaatacttcctttttcagaatgtacaacgaacctgcttgattgccagaaagagctgaaataatcacctggtcattaattaaaaactcgccatatgctgaatcaattttacctgaaacctgattgtatagcgaatgagggtcaaatacgagctcaatgtgagttactccaggaatttcatcaaactggcagcgaatattaacgcgaggatatcccattacactaaatttagacatataaaaataatcctaatataacgccgctaataaaagcggcagtaacagaaattaacaaaactactaattcagcctcaatcatttcttggccttagcaagtttaaatgcttttttgaattcttcaacatcttcaacaggaatccagaagcctgagccatacccatcttcatagcatgggcagttatcacagtaatcattccaatagacagtttcaccacccatagtgaatggagcttccatttggcacagtacttcttcaacacgctctaattcttctgggtttttatcgcaaatgcagaaattccatttaccacgatattcagaaccaagtttgatgctttgacgttgaagtttcatttttattctccagtagattatggagctatactatcacaagcatagctccttgtaaactactttttgaaaacttttttgatcaagtcaatcatttcttctgcattttctggggtaacgatcaagtccaagcgagtaggaccaggttggattgcactaccaatttcatatactggttcgaagtatttgaattcataatcagcgatttcaaagtatgcatctccaaattcttcagcgtcagcagttgttccatctttaaattttacttctgtgatgaaactattatcttcgtcgagcattttagtaggaaagaacgaaccaccgtgttcttcaatcatcaagcgcatccggcgatttccgcttgatgaaaggtcccactcggcagcaagacttgggataatgcgatattctgtgttcagtttcataatttacccgctaaaagtcgttaatgtatcttcacggcattcatcatccatgccaggaaaatattctcgttcaagccataaccatagagtaggagtatcaccttctacagtgatttcgtttcctccccatggggcagacttgttactaacttcaatcaaaccgtatttttcaatggtttcaatgaagtgttcataatcatatatttctacagtaacctgtgccattatcatttcctcaaagtggggaccgaagtccccaaaggtaattactctttccagtcttccatcataaaatcaatatcttcccactcgtttgcttctaaccaagcacgaaccgcttctttagaaccacggaggtcaatatttggccaaccgccaccagggccttctttaataactaaatcaaaatcaataccatggtcagtgtcataaaaacgtgaactatcttcaaaaatcaaatcagtacaaaatcctgatttattaatgtagggttctgccacgatatcaatgtttaatttacccatgatgttttcctctactcgttttgtttcgatgtagatatagtatcactcatcaactggcttgtaaacaattttgtgaaaatatttttggagggataaagaaaaagggacccgaaggtccctttatattagaggtcgttcagaatatcattcagatcgtcatcgccaacactgtcaccagcatcgcccatgatatcgtctgcggaacgagaagaggtcggtttggattcaaaatcagacaggtctttgtcaaaggaatccaggtcatcaccaattttatcggcttgagctgctgcttttgccgcggcaccaccaagagctgctgtacccataatctgtttaaatttggcttcgttaacttcaaacgatttaaactgagatggagccacaatttcgctgaggtcagccatattttcggtcaggaatttctgagtttcttcatcattgatgtttgcaatctcggactgaccaaggaatttacattcatcatagttctggaaaccaccgactttcttaactttcatgacgaagtttgcaccttcatacacacaagttacatcaaccggagtttcacccatatcaacatcgacttcaaccatcgcgttgattttgtccataattttctgaccgaaacggaatttgaatactttaccttcgttttctgggttagccgggtctttaataaccaggatgttagaccagaaagaggttttacgtttcagaagcttatattcagccgggttgctgttataagaatcgtttttactcagatgagcacaaaccgggcaagaatcaaaatcaccgtgagtagaagtacaattttcgatgtaccatttaccgccgtgtttgaaaccgtgattgattagttttacaaacggcagagagttttcatctttaccaggcaggaagcgaattactgcttgaccattaccagcattatcggtcttcagtttccattcgtttttgtcttcgttagagaaagaagaaccacctttcagaccagccagttgttgttgaagttgagcaggatttttacgcttaaacatatgattacctttttaaatttaacagttgttgttgcaacatgggtccttgcaactggacgatagattaattatatactaatttctttacaagatttgattatgctaataaagagtttcttagcttcagcaccgtcaacgtttaaaagttttttataagcttttaatttagtagagtaattactccaaactaagttatccgttgcagtatcatgtgtatttattatatctaaaaacgagtcaagcatgatgaatgtctcgaaagatataacgtttgactgcagaagtttgaacacataagatgttccgactttctcattatattcaaaaatatcatgaagcttatctacattaactttcttggcaaaatagtaaatgttctttacatcttccgagaacgttgttttaatctgcttcaacttaccgatgtattcacggtagaatatcaacgcatcagcgtcactgatatcaccaatccaagcgtcttgattagctacaagattgctcatgaatatcagagtcaattcctttagcgtatatttctcagcgagtttctcaaagaaatatttgtctctacgcttttgataagctttatcagagacccgcataacccagttatacttaacaacgtcatatcgaccggcaaagtgttgtttgagcattaaatataaaagataaacgctcttaccgttaacgtatctgttattatttccaggcatgcggagacgaatcataataaaaagtccagactattcgttttgtgtgtttgactaaatgatggacgaagcatattttcttccaatgcttctgacataattttttctatgattgctggaggaatatatctattgaagtttccctcaggaatagaattttcttctaaccactgagttgttgcttcaagataccccattccaagttctgttaccatagactcaatagtaaatccgttagcttgcttatctaacagctgattaatggattcagagggggaggtatccccctcgtctttaagcgaaaatagagtcataagcttctaccacttcatctttttcagtttcaaaacgatcgcgtgtgcctttatggaacagagcaagcagttgattaaacagtttgccttctacgccaagttctttcttggcgcggtctttaatgtctttgttaagttcaagatagctttctgcttttagcttattacctgaggcttccttaatcatatctcgcagagcctgtccatgtaccacttcatcaaatactacttgctctttatctttcttagccattatattcaccttaaaagttgttaatttctttcattaatttagacagaccggatttaacaaagtagctataaattttgccacgacccggtaattgatagttattataacaatctaaaatgttagcaacaatgtcttcgcggatgtaatcaaaatcgattaacacacggttttccaagaaacgcttatactgttcttcagtaagcaaatctttaatgttttcgccagcatcaagacattcttcaacaaatgtcattttcgttgaaggagtacgctcaccatcaacatgagtgtaccaaaagtctgaacgaactttaatagaagcgacgttatctttcttgtcacctttaataattttaaccatgcaatctaaagcaggagaacccgttttagatttcaccaatttcttctgcattggtgaccattgcttaacattaggatacttatgcaattgagtaaagtcaccgtcagaagaaacaatcataacaggatgaccttcgagactgaactttttggtcagtacagcaatactatcatcagcttctgctttatcaatatcaatgacgtaataaggcatatactgcttaaattcatcaattacagtacgaagaccttcaaagtaaccttcccagtcccaattggattcttcacgggctttagcacggttctttttataataatatgctacatcccggcgccagtatccattgattgcattatcaacacaaatgacaatttttgtgtatccgtccttcttccacttaaaagcattaaattttaaagtagaaagaataagatgacgaaccataggagtggttagtttatcgccttctttatacgtatgaagaattgtcgccattgcgatttgcgacaagtcaatcagaatgacgccttcttttacttggtcttcttcggcgaataagcaatttaaatcagacatttgaacctcgttcaattagttagtacagccattataaatacttctataatgaagcataaccccataggagactctatgagcgatttactgaaacaacatttccgtgcaacgaacggcttggacgcaggcggaaataaagttataaatgtggcactagctgaccgcaacgttaaaaccgacggcgtctccgtcgagtacgttattcaagaaaacactatccaaaaatatgacccgacacgtgggtatctcactgattttgctgtgacttatggacgtcgtatctggattgcaaataaagatattccaaagcctgctggaaattttaaccaggcgaattggacttctttacgtgttgacccgaattggatttataccgtccgtaaaggagagtttgaaattcaatctggtcagttcatcaacgttgactctaacgctgcaggtaatgctacattactgcttccgttagcaccagatgaaggcgataccatcgtagttcgtgatattggcgggcgtcctggctataacggaatcttaattaaagcacaagatactggtgcgtctatcgtatttggtgaatcgcgtctgcgtgaggtaagacttacacgtccatattcacaaattatgcttacgtttagtaatggtgcatggcgtgcaagtttaaccgattttggcgatactgctaaaatggtagttccgaacgggattgttccgacgcaagttcaggcaggtgataacgtagttcgtcgttatacttccaactcagagatttttattactctgccgttgttcgctaattcaaacgatatcatcaattttactgaccttgacggtacatcgccaattaaccatatgactgtgcgtacgtttgacccaactatctcaattgggactcctggacaaacagaggttcaagtacgtacttcgggtaatgggtttttggtatatgactcgattgacaaaatctggcgtatttttgaaaatgatttacgcacccgagtaagaataattacttctgacgttactttaatgcctaatgagcatatttctgtatttggcgcagataacaataccgttaaaacaattaacgttactttgcctacagacgtagctgttggggatactgtcaaaatcgcaatgaattatatgcgtaaaggacagactgtagtaattaaagcttctgatggtgatactatcgctagcaatttgaatttactgcaatttccaaaacgctcagagtatccacctgatgcagcatgggttcaatcaagctcgattacctttaacggaactacgtcatatgttcctgttcttgagcttgcatatattgaagaaaaagcaacaggaaaaagctattggattgtaactgaatctgaccctaccgtagaacgtgttgatgctaaagacaatactaccagagcacgattaggtgttattgctcttgctacacaagctcaagctaacgcggagtcaagtccagaaaaagaattagcaattacgccagaaaccttaaacggacgtcgttctactgaaactcagactggtatagcaagaattgcaacttctagtgaagttaatcaggcaacaactgcttcttacttggataacgtaatcgttactcctaaaaagcttaacgaaagagctgctactgaaacccgtagaggtttagctgaaattgcgtctaacgctaaaatggatgaaggaacagacgattttacaattgttactcctaagaagttgctttatcgtactacatcggattcacgattaggtgttattcaattagtaaaaattggcggtgctcctaacacaactgctgaccgttcttctgccggcacaggtatattcgatcattctgattacaaaaatgcagttactccaaaaactcttcgtgagtataaagctactgtaaatcagtcaggaatagtttggttagcaactgatagcgaagttagaaacggaactccggcttcttcaaatattcctacagtcgttacaccagaagctttgcataaaaaagttgctactgatggagaaattggattaatccaaatagcttcacagacagaagttaatgctggcggagtgactaataaagcagttacacctaaaacattaaatgaccgtacagcaactaacgatcgtactggtattgctcgcttcgcgacacctggtgcccagggtgaatttgaagctggtacttcaagtacagtaatggtaaaccctaaattattatttgataaatttgctaatactgatcgtatccaagttaatactagttctggcttaactattactgggaacctctgggaccattataccatcaacatacaggaagcaagtacttctcaaagaggtacaaccactcttgccactgctgctgaggttagaaccggcaccgacgccaagaaaatagttactgctgccacgctacatgctaaaacagcaactgaaggagatatcggtcttgctcagtatgctacacaggcacaagttgatgcaggcacattaagtgatagaattgtttctcctgcttacttgaaacagactattcaggtaacagagtcatggcaagctacagacagcgttagagggaccgtgaggctatctacgggcgatggaacgtggaaaggtaatgataccgatggctcaactcttccggataacgggtatgcctctaagggcgtcgcagtgtctccatatgaattgaacctcacgttgaaacattacttacctcgtcttggtaaagcctatgacaccggaatgctaggtggtcaaaccccagacaaatatgctcgtagcgatatagcgcagactatttctggagcttggtcatttagtcaggacacttcatttagcaataatatttctgtccagaatattatatatgctaatggcggtgaagttaaaatttctccaactgctgacaccggaaacgtgcatgttcgttttcaaaatagagatggaagcgagcgtggtataatttatgctgagccgcaaactgcttcagctggaactttaaaaattcgtgtcaaaaacggaactggaactactgctgcaagccagacctacacatttggcggtaacggtacgttagaagttcctaacgaagtgtcaactaaaactctgaggtcttctggaaatgcaatagttggcggaactgttatggttaaggacgttcagatgcttgctgtcgagggattgaattcaatattcggcgcccaatcacagtccgcatttattcgttcccgtgacgctgatacacaaatttttgcacaggattcaactggatcgtatccaattttaactaccaaaaactatgcaagactagctgatggccgttatgttaataaagctggcgataccatgactggtaatcttaacttaagcggttctgctatcgtcattacaggttctgaatcatggtatgttccaacgaatgaaactgtactgagacaaggttcttggactgctgaaattaaagacgctactaaattacaaggtcttcgtggttatatggttccgatcagaacaccaattgaccctgctaacccaagcactttagtagtgaccggatatgaagaaaaaactgcagctggtggtgttttaactcaggttggtgtaactacaaacaatacttatcagctttggactccttatcctccgacaaccgaaactgctgataagcgtttcgcgcatactgtgtggatgaggatttataatccaaaccttaataagtttgatgattggatgcgagtgttcacgtctgctactcctccgactgcagctgatattggtgctccgagctcagtatcaactcaggttaaaacccttgaagtcctggaatggattaagcttggcccagttaaaatctggccagaccgtccaaaccaaactctcaaatttgaatgggtaggtgattaatggctgaaccaattttaatggcagcctttggcgaggatttcgtggaaacacgaatcctctctgaggcaaactctgtgaagtattggctaaaagcttatgctacgcattctaatgctgttcctaataagccagaattgaatattaatggtgcctttgatatgacctcctccttacggagggggattaatgttgttcaagttaatggtgacagttttattaacttcaaaacatttgacgttaccactgatgataacaacgctaataacaaagcgtttgtagaatatgcaaatggattaacttcaggattgtatattataatgacacatgaacgatttcaatccagcccgttaatagacagatggtttaaaaacaagtggtctgcttcttggccaggttctgacttttccaaatcatttccaaactctgcctatgttggagtgctcggagcagcaaaaggacgtatattaattgagtcattttacggaaatgatggtgtagttaaagaagattccagagctaaagtcgatacagtgtatgataacgttggcgatgtaggatatacaggctgcccttatcgttccattgaagacactaatgagtactcggattctactggatatgaatataagcgatatccagttcaaaatgaatctataagcaaaatcgctgattatggattatctcccggggattcggtgtttttagtgtgtgatatgtatgcatctaaaagccttcttgatgcaggttctactactagggctaacttaagatggttcaaaggtacatctttattatcttcaagcgtatcattagaaattccaaaaaatggagctgatagatggctaagatttgaaagatttaccgctgttcctacagacgctgatggatttactattgtggtatcacgatatccaaaaacgtccgtagttggtgactctaaaatcaaaaaccttgtatttgttcaaacctctcatagcgaaaaactgaatagcgttgttcaagaatttggcgtgaatggcgtaagaatgaataaaggcgttgaaggaggaaccactatgattatggaacttccaaattcaaaagtcgatccgagcggtgttattccagttcaatcgttcagagaaacatctgattaaggaagccttcgggcttccttttttcgtataaatagaaaatatataagaggataaactatggccgatttaaaagcaggttcaacagttggcggaaatcctatttggcacgcaggtacttttcctcttgtgccggcaggaaactccctaacttatagaggtgtaaaggtttatactgagatagataaacctcaagcaaatgataatgatttcgtatctaaagctaatggtggcacaggttctcaaggtttccaaaaggaagtcgaatttaaagaaggcgtaaaagtttctgcgaccttcagtggcggcaacagtttaaacgggctttattctggtaatggagactcagcatctctaacaacagcgaacattgacattgtttcatggtacggtgtcggtattcgtacttcagtggatggtagagaacggacagtagtttggaacgctagaaccggggaccaaataaacaaaggaagtataacagcttctattcttagttctaataatgctcctacagccgctcagcatttaacgcgtaaagattatgtcgatggacgaataaatactgttagcaacgtagctaacgcagcagtcaagaaagctggtgataccatgacaggtgcactacgagctgaagctggcgtagttatagtaaacacagcaacatccggtgaatatgctcctagattagatcaggttatttcacgcggggtaacaatagattttggcacatactaagaggtagccatggccgatcaaaacttaaaacaaatacaatttaaaagaactagcacagagaataaagcaccaggtgcagatatcgtagcccgtggcgaaatcgctttgaatacacatgggcgtactcttgccatttatactaaagatgaaaatgatgccgtagtacagctcgccggtaaaggggttcctttcttagatacctccggaactcttagcgttgatggaactactacattaaaagacaacgtaactatttctccgaataaagcaattagttttgaaactactgatttgagcggtgaaataactcgtcatatcgttggcaaatgcgctactaatgatggttggtacattggtgccggtggtacaagcaataatggtattcttgaaatcggtactattgacgatggtactgaaacaatccagtttgtacagcgtggtgccggtaacgttgaagctagaaagctggtcttgcttgacggctcgggtaataccactcttcctggggatttaagattatccaccaataaagccattaaaatttacagtggaagcactagtgttcttgaaatgggcgtaggagctaatgatgtctatattaaaaaccaaaaaggcgcaggtgttcttcaattaaccaatgatagtaatctgtcgttcagaaattaccaggtttattatgccatgaacggaagaggtcctggtaaatccggtactcttctgacgaatgtagaaaacaatcgtcaagcctggcaatacgtaatttctgctgcaactgcgtcaactgctcgctgggtaaaagtagctacaataaagcatccaggaatgggttcttcgcaactggatttaatgattagcggtggtattgattctgggcacggtagacattacgttgattttatcacgttatcaggacgaaatttaacatcatggagcaccaacagtttagataactgggttgaatggcgccgggttgggtctccttctaaaacgaacgttccagagtattacgttgttaaaaacgattctgctactgatgcggatgcgtcatttgatttttatgctaagattcctcgttatggcaatggcctttatgttacagtgctaaacgcatctggatacaacggccaagattcaggtacagtaattatctatgaaaccaatcaggacactggtgatactggaccgtccggaagtattcttgtttcaatgaaacagatttttgatagtttagcaaaaccagatttcggtgatactaccggtactcttccggttaaccgaggtggtacaggtgctactaacgtaggagacgctcgaaataacttaggtttaggtactgcggccgttcgtgatgtcggtgaaggcgctggtaatgttttagaaaatggcgcttacggcttaggcggtaatggtggtaaatccatcaatgacattgtctctaacgctgatatgttgacacgtttaaaggcttatggcggtactttctggcgtggtgttactaaatctggtgttagtgttcaaaatggtctttacagccacggctccggtatttttatgaatgctggagacaccatgtcagccattaatatcgactacgctagtgctaaagttcgtgtatatgcagctaacaatagtggtcttgctgcaggaaatgttaactacaatgaactttacggtacagcaaacaaaccaactaaggctgacgtcggacttggtaatctgacaaacgatacccaagttaagaaagctggcgacaccatgactggtgatttaactgttcctaatttacatgcttccggcccgggtactgcatcagtatatgttaatgcaggaaccggaaatgctcatgtatggtttagaacagacggtaacgaacgtggtgtaatttgggcaactccgaatacagcagacttaggacaaattaatattcgcgcaaaaaccactggaggtacttctgccggtgattttagcttccgttctgacggccgacttgatgttcctgtagcagttaaagttggtggagaagcaatgctaaccaaagacgggaatattacctctggttcgatgtttggtggcaaccttaacaactatctgggcaccattaaaaatgatatcgttgctggcgataataagcaagtaagcaagactggtgataccatgaccggcaacttgactattaacgctaacttaaaggtcgaaaatcctaatggaacgatggttgatttaggttcagagaactcagacaagtacagcagattaacccttgcacgtaaagttggcgacggcgctgtagtagcaatgcttaaagttactcctgaaggatacgtgcaatttggttatcaaactgcagtttctaccccagctcctactaagtacctcctggttaaatctaacggtcttgaggtagaaggggatttagtttttaatcagacctatcgcggcactgaagaggcagttgatattactgataagactgttgaccttaatggtcttgtcattaaaggaaccgacccaggtactcgtcagatgtataaatgcttctcatatggtggtggttctaatatatcgaacaaacctacctctgacggcaactttgttcttgaagttctatctttgcgtaaaatttctgatactgattggacttgtaagcagacctttactacaaaaggtaatgttgaaggtacatatgttcgatactgccaaaacggcacatggtctgcatggaaagaggttgttgcaggggttcaaccgatcaatttaggcggtactggagcaacatctgtagctgctgctcgtaataacctcggtgttggtgaatggcaatctgtggcatttggtgtattgaatgtcaacggcgttagtaatgcagacccggccatcacatttaaaaatggggctgtggttcgtgaagcccaaggtggtagtctcggcgcgttaatcctgtcggcttctactacatctccagacggcgcgaaatatattgcttttcgacccttcggtgattcgtctggtactgagattagagtaaaagccaacgggtcaagtgagccactacttgaatggtcttatggcccaggtattcgttcaaattcatctggcgcttttgttatctacgcaaaaacaggtcaggcactccatttaagaccaaacggtgataattctaaccaagccacagttattgaccaaaacggtaaaatgacagtcggtggtgaatttgaggcccagaactcaaaaatcactggtaatttgaatgtatctgaagataacagaatgatcgttcttggcaaaaactccgacttcgggttggtcaagaaaagtggtatgtcaggaaaaatggctattagtaaatctaactcgtttactattatggtatcaacaaataccaacaaccaaattaatcctgctgatacgtttaatgatatattcaaagtagatgctgatggaaaccagactgtttacggaaatgcccagattaacagacagctaacagtttctagtgcagcgactgttaatggtgttattaatgccaacggcggtattattgttcctactaccaagtatgtgcaaattgacgatgctcctacgcagaataaccaagccaccaacaagaaatatgttgatgataaggttgcttctgctattagtaatgctggtgatacatatcttccgttagcaggtggtaccgtaaccggaagattaataattacaggtgatcagttaaaaactacatcgctctggactaccggagacgctgctgttaacggtgctttaactgttgacggtaatgttgttagtaattacggtattggtagctttgttggtgctgtcgatgttaaggcccctgccgcagataatggtacaacccacctttggttccgacattccaatggtggtgagcgtggtgtgatttatatgccgcgtgacaataataccatgatgggtttaagagccggtggaagtgaatggcaattacatggctctgcaggccaaatggtagggccaggcgcacgctggagaattcatcctgatggcaacatacagggtgatgtttatggtggttatatcactaactatatcaacgataggtttaaccaatgtgctcaatgggttcgtactggtgctcaacaagactttggcccaattggtcgaccggcacctggtaaaactgttcctgctggttgggtacttgttggtcttaacggtaacagcaacgaagctaaccagaacatgcaacttatcggcggacggttacaagtatggaaaccgggcgttcaatgggttgattctgctacttgataataaggggcttcgacccctttaaacttaaaggtaaaataatgattgttaaacaaatgaaaggtattaaatggcaccacaattttgagggtggtgcttattatcgggactgtaacgataattgttggtacaaatttagaaattctcttgacaagaattctcatatcattatagttaatgctaaaaccaacaagatacttaattactataatggcgaagaccccaccatgatcgggttatttgcagataaagaaatgattttggatgtataccaacttgacgattttcctgttgattcatggggagaattttcacaaagagaatttgaatttgtagacgaacaagttgtgatgactaaagacgtacaagttcctaaagaaagaactaaagatgacattatgaaagacttgatgaagcttaaagctgaattggaatcattgcaataaatagctctgtaaggagagcaatatggcaagcaaacaatcaataccattttttgatatgtttcttgggttgctcgagctattattcaaagatggagccacgggaagagttctcttttcccgtgttttcgttgtcatacttttagcattgttggcgtttgctggatataagtctgatagtcttattaccgcttacgtcgacagtacttatgacaagtatgataaactggttcaaaaggatagagattcccgatttgataatacagcactcgaacaactccagatagtacatatatcaagcggtgcagatttttctgcggtctttacgttcagacctaaaaacttgaactacttcgtagacttaattgcttatgaggggactttacctagcacggtagattctaaaaacttgggaggatatccaatcgacaaaacaactgctgaatatagcacgcatttatcgggtagatatttttggacggataaggaattcgttttcttaccgacaaaaagaaaaccgcctgaaatatcgtatatgtttagctgtccatatttcaatttagacaatgtttatgctggaactgttgaaatgtactggtacaattccaaacctgcattatctaacgaaagactaacatcgatatgtggtcaggcggttagagcacttggaagagctaagtgattacttattgctatgcatagccattgttcgatagatagactcaaatccctcgttgtattcttcaacgagaattctcttctcttcgtcagttaattcagaaaccattttacgaaagttgctctgatttaactgacgcccctgctcgttctttattccaatttcattcaagaacgcaataaattcatctcgcttctccatgatatgttcagcattgaacttagtcagaatagaagcaacagtaacaatttcttggacaatttcaaacttagtcattatttttcctacaacataatggattatgtgattatagtatcatcttgataccgcgttgtaaaccagtttatgccaattcccaacgagaattcaaatcttccttggtagtgatatactcagcaccagaggacatccagagcccgtagcgaccatcttttactttagccgttaaatacaattcctttccaattggacgaaccctacgattcaaccagtgacatacgtcaattgcctcctgaaaagacaagtcaatcagacttccaagcgcgattttattcattaacgcttcgagatatctttgtgattcaacgacagattctaagttatgactcatgctaaaacaacctctccgcgattacctaaaatgctttcgatatactcaactccacttataatgtcacctctatccttggcttcatcttctctgcgtaaggcttcagtattcatagataatctccaatgtcataagcatcaacacatttctgaaattgttcaataacttcttcaggttcaacattagcgataatagctacagtaaaggtaccattattccaatcgtgtaccatccagtctccatagccagcattctggaggtcttccattagttcagaatggatatctgctactaatccagaatggtcccctaatttcttgtggagagcttctaggtcatcacaaataatagttaaagtagtacatttggaattattcagaatgcgcattgtctttacctttgtgtttttgcttacgttttgattctttggcagcacgctttttatctttgtgtgctccgcctttattaaaatcatgtttagctactagattttgcactttcaagttccttgatgtaatagtcaatatctttaatcatttcttctgtcattactttgtacatttcagcaagaaacggtttagcgccgccattaaatggatgactaaacggacagatgtattccttatccatgagagttttcatgaatttgctgtctgccattttaaacccggcttcattggtatatgtaccccaattatcgtccatcatttctaatgagcgctgaagcgatttacgttgaatttttaaaagcgtaatgttattctttaatgtactaatcattagtataaatcctctgagaataattcattggctggtcctgatttaggacgaacggtattaacttgacctgcatgtgtagcgatgattaatgcttcttcacgtgtgaagtactcgccccactggtcaacaaatccttgattgtctccatggacatggtcagaaaccaatttgtcacggaacatatctagaacgttcgccatatcaacagaataatggcgagtgcctggaactacaattgttccaccagttttcaattcaaaacgatttgctgcacaaacgatacgacgttgaagtaatcgtccatcccaccaatcagctactttaaagcaaatttcaggaatactaacttcttttggctcattaattagagcaccgtgacgagaagcatcaacaaatttattcatttgttcggaaaacttgctcatttaaagaatcctttaattttctgccacaaacttttcttttcacgaataccgatttgacgaataacaggttcaccctgcattttctctaaccattccattgagttaacagcttccgccattggaacaaatttagcaagggccttttggtaattatctacatccatgatatgtttaccatctgcattgtagatagcatagcattttgcgaatttcttatcaatgtatccgataaagtgcccacggaaccatacatcccaacaatcagttgggatattagcattcaagttaactttttcaacacaacgctgaagttcattcaatactttaaacttgttcattacagttccttaatagagcggatgatggtttcaatgttttcagcagtacgggcgatatctaagtaagtattgcctgttgcagctacacggcaagacattccgaggtcagtgaagtgtttctgatgctcttcagaaatcttgtaaccgaagatgcggaaagtacctttattgttaacttcaagactacgaataccgaaggtacgtttttccagaactgcgatatagttactgcggtaaacagtcagttctttcaaaggcaagatatcttccatctcaccgagaagtttcatcatcaggtctttgtgctcattcatatcttcagtcagaggacgagctttacgagtattgcgtttcttaagaagttcaggcttgttctcttctgcatagataactgccgctttagagatgatgtcctgtgcttcaccagtgatgattaaaccgtcaccagatttctcgatgagacctttcttaatcagaacaccaatatttgagttgacagaacctgcgttcatggtttcttcaaggatttcacgcagttcagcagaagtgatgaaatcttttttagctacctgaaccaggatagcagcagttttttcgttcagagcatcttcggaagctttgatgatgtaagttactttagacattgtgattctccatgatgttttattcaatttgtttggtatgagactataatatcatctgctaaccggcttgtaaacaactttgtgaaaataatttggggcattctaaggagggattttggagggatatagatttatatggaaggacctggagatgacctccaggttccctagattaattgagtagcaacaaaattagacctaatacagcaattacagaacctataattaaataaaattctatcatagttcttccaggtctttcagatactcagcttcaggagttgtcttttcccagtacttaacctcttgcgcaagacgttttgcttcctgagcaagtttcttcgcttcatcatcagtgatgtgatagatgttcattgaaacgagtttttcagaatggtctttgaatagttcattctgttcaatttctttagtcagttgcttgcgagttttaccttggataacgatgttacctgcgataacctctttgataaattgagcttttgcctgagcaagattaaacgcctgtttagtttcagctattttatgctcgattcgtttggcagtgaatgtcttacggacttctacgaaatgacgaattaactcacctgaagttttgaacttatcgttcaatttaccgttctcgtcgatgactactatgtactgactcattttctcaatgagcttaaagtccttcatgattttaacatgacgctgctcagggtcatcgctcaaagcatagtctttacggaatttcaccttaaagccaaacccggtcttagaacagtcatcatcatatgtgatatatcctgcatcttccaacgggtcaagtactttttcaacgtaagaagctcgttcaaacttgtatggaatttcactgatatagattgagttccgtgaagtttctttatacacaccgtgtagttcaacagaaccgtcttcggtttgaacgatttttccattaaatttagggaactgaacttcaggttccatcatttcgccacgaagtgctgctttagtgcattccaaaacagattcaaaactatgcggaagaatagaagttgaataacctgttgcaataccgcgaacgccattcagaagaacagtcggaattaccggcagataatacgcaggtggaacatgttctttatctttatgcactggagcgatttctgtgtctttgtagattttacggaagttgtcagaaatccggcagaaaatataacgacttgccgcagcagattgaaccagacgcgaaccgaagttgccttgcccatctaacagaggatagttgttattccatgtgtttgccatcaatgcaccagcatcttgagcagacgtttcaccatgatgatatcctaaatcagctacaccaccggcgacagacgcaagcttatggaatttttctttattaccgcgagctaaatcaagagcccgagcaataacaaaacgctgtacaggtttaaacccatcaatcaagttcggaatagcacggttttctacagtgtaaatcgcatactcttttgcttcattatcaatgatagatttcaaatcgcgatgacgaagatttgacgctttagccaaatcatcaatagaacctgcttgctttaatagagtgtcaaaaatatccattgtacctaccaaattagtgagccgatttgtactataacatcggaaatgaaaagcacaatataaatcatcccgtaaatcattccatagtacaaaattaaaagcaaagcggctactaaagccgctccaatcaaaattttcttaatcattggaaagggctgctataataagaataattgataaagttccttgcgctaacgcctgcgaaataacagaagtttcacctgtagtcaatgtcgatacgcatagagcagcccaaattccgccagcaattcctttaatcatttgtaaactcctacaattttacaaatgcgctcaaacataataaatgctgcagtgaacgcaatgcttccgattactttagtggtaggcacaaggccataccacatgaatgttcctgagcaaatcattagggccatcagaaacacatagcccatcacgaagaaggttctcattagtatttctgcaaagtaaagatgaagttatcattcagaatacgattcagctcagagtaggtctgtgcgtcgcttgaatgctgacgagtaaacgccaatgcaagctgacctttgccataaccggtggtgagcggtttcattttattagcaggaatccaaaacacaccgtatgttacacagtttgaacgaagggtacgacccaactgagaacgccccgaacggatatgagaaagaacactctcaaaccctgcttttgaacgctgtttagccacaaagaaacgagcagatgcaccgatataacctgctttgccatcattgaacatcaaaaaataaaatccttcacgctcagtaatttcacgagatggagcaccagctgcccaatcaccgttacgaatagaaccgatcagttctgcaccagctttatcgagatcagcaaaagtcataatattacgcatgttaatttcctcagttaattaaagtttattctccgatgagggaccgaagcccctcttattaccaaaatactactaccgctgtcacgataccaacccaaaatacaagaagacccgaagccaacagacgatatacaatgtgtcgtttcatttttgaccttcccatacggtttctactaaggatttaaggccatcggtctgaatagtatccaccgcttgaatagcaaaataaattccgaacccgaatatagcaacaattcccagcgctaccgcaacgataaaagacagaacaacagttctcattaagttaaagcgacgatcaaaactactacgaatcattatattttcctcagatgaaagcattaatccagacgttaactaaatcccatgcgaaaacaccaatgaaagtaacgataaggcagaatactacaaaggtgttcttcaaaatcgtaagtaactttttcatttttgttctccagtttagctaacaagattatagtatcaccgaagaacaggaaagtaaaccgttaaatgcacaagttacgaattttttcttctaaggctttaactttatctttatgctcatcacgggcagcggcagctccattaggatacaatccgccataagttgaatcgccattatcacaagcaatgatagcataatgccaattcatagattcgagaatcctatactctttcaaaagttcagctttaatagaagcatttccgcgtttagctcgaagtgattttagctctaagtaactcatgttttactcccgttcagtttgtaaggccatagtatcatggccaatcccggaagtaaacaactttttaaaatttgtgcatgatatacccgccagctccaactcgtgaaggttttactacttccatgaggtgatcgataccgccggcaaacattggtgtgtactgtatgacattctgggacacttcttctgcaacgaatataattatacagtctgcgactttatgtttaaacatgggccctagatttattccacttccattagggaatagaccgtctttaccagtcgtaacgttaatccatggcttatgatttgctcggtcatgaacaaagtgtgttttaacttcaactctaacaccttggtagtgtggatgagctaatacgtcccatgcccattcatacggatcgttgttattatggtcaacaacttgatcgttcacgtatccatcgagaaaatctgctaccacatactctgccggtatagcaattctacatcttttaagaacatcaattctgtcttgagatggatcgatatctaaactatatcttgcagtatcaatgatttttacttttgcttcaccccttagcttattcaaatctagggtaaatgtccggagttggttcaatctctgcagggctttgttcatcaatgccataaattcctctgatatgtaattcaccaaaataaacacgatcgtcgtggttacaagtgtctggttccacaacaaaatcatcaccaagttctacaagttcatcacagtgcaaccaagcatagtgaacatcaccttcatgtttaaccacatgatggcaaaatactgtagccgcatgatgagtaccacgaagattaacaactttagaatgagatacgttaaatggattaatcatgtttcacccataataaaagaggagcccgaaggctccttataattagcgaagttctgaaccccaacgatcagttacatcttctaatactacataaccacatgtacgcattttagcgtcgttgtaatcaaccgggatagatactacatcacgcggatgaactttaactgaaacaatacggtcagaaccactaccgaagtgaccgatgtaagatttagagcagacatgcagacctgcggaacaagtacgctgatcgtcttcatctacctggttacgcggcattgtaacagttttaccaggagagttatcaaacgtgtttgaagcacagtccatataagtggaacgaactactttccaaccaatgaagtgaccatcatcagtgatgtcgatatcgtttgcattcaggaaatcaaacagacgataaactgcacgacgagatgggttaagcatcaggttttccaggaaaggcagataacgtttaaagtcttcgccatcttccatggctcgaacgatacgctcagtcagaccggatttcagctcgatatctttatagaataaagtaccatcttcaattcggacgttaccctgaacgaatttcttgatgccttgttccaggttaatgtggtcaatagcaccagcgatatcaccatctacaagtttctgcaatgcagatttaaatccaggatgttggctatcggcattataagtagtacggccttcagtaattgaaatgaatttggaacttgctgcccatttaaattcacgctcaaccggagcttctactttagcaggaacagctgccgcggcagctcgagcttcacgctctttaaacacacgccgaatggtgtcacgggaaacaccataattctcggcgagctctttcttagtgtacagaccgtttttgaagtttttaacgattgcatctttttggatttcagacagacaggtaacagccatttattcacctttattttcagaattttgagtagaagctccgtcaaggagctccatgatttttacaatatcatcgacgagtttgctgtcagtccgccaagtatccaagacacttgcgatgacaggataatcatctttaaactgttcaatctttttatagaagattgtctcagcatcaccagacagtttattataaattttattacataaagctaaatcatcgttttcatctttgattttacttgtacgacaaaccttagcgattttgtttaattttgtcaggaacggatttttcattcctgacgcagtaaacttactcgacaagaaattcaatttatcgtaatgcgcaatatttccacagatacgatttccagtagcatttgatggcatgtactggtcataatctaccttatcaatacacttgatgtattggtcaataataagtcggtcaaatgaaagcaatccatcagcttttgccgcggctttcatagcacccggacgaattgcatagaatttcttaattccacacgcttctgccagagaccgcatgctcgcaatgttcatattccaccaccaaacattatctgggaaagtgtggatttcatcacgattacgaccgattgcataaccttcaagctcagcaatttcagatgatactaaagtctgacggtcttcttcccaatacccgtctttatcaatccaatgtaatgacacattaggagatttcggacgtttctcttttggaccagtgtcataatcaggaagagcttttctttgggcttcaagttcagacacacggaatactacaacttcatcagtatccatgattttcttcagctcatcaatgacatgcaattcatcttcattgtctttgattactgtaatgtgtgcccagattggaactaatccagatttacacagagcacgaaccgtagcaatacgcttacccgctttatcatcaataagaacgaacgctttagttctatcaacgccacaaatatcagaaatgtttacttggttatgacgatgccaagaactgcttgacactttacgacgagcaggttcatcacatgaaacataaactgatacttcgttatctacataatatgaacgaattttatcaagattatacttcgcaactacttgtttaatatcgcggttcccaatggtaataccgcggctctgaagaatagaacgttccttagaactcagcttattgaactcgcgcaggaattcacggtcagattcatacgcttcaaacgctttaatatctgcggtaattacctcttcttcaagagcattcacacgcttctggatattggcaattgtttcttcatcaagagaaagctcttcacgagatggagtaatgtctaattcgccaagagggaaatgaacataaaccttgccataacgattaagcagccaatctgccttaacatctacaccgctgatcggatatacgatttttccataaactgcgtacagaccatagctttcatacgaactattaacgctgaaccagtcggtcttatctaccgggaaatattcaatttcacggcgaagagaatctacctttggaggtacagcaccaaatgtacgcaaaatatatgcgatttcatagtgccaggtatcaatatcttctactttaaccggaaccgtgatttcaagaccagtttcttcgtcttctttcatatcatcgacaaacatcggacgaatagtaggttcacctcggtttttcatgacagtataaccggtggctttaccattatgatatgatactacgttaaatgtactcgtgtagctcagtggagatttagaaccaagaccaagagcaccgatgaaatcattactgttattctttgtggattcaaagaacgttttgtacatcgtcatcatgtcattatgattaagacctgggccataatcacgaattacaaatcgtgggtcaagacgagtaggagccttgatataaaatggacgattttcattgccgttcaatttatgagcatcatcgcagttagtagaaagttcacgaacaacagcacgaactttatacttatagagtttatttgacaagatgtcaaaagctttacctgaggccttaatagtaaacgttgaatcatcagcgtcagaagaaccaatgattacttcatcatcacatttaattttcattttattcctatcaattatgtcgtttaatgatttctgctacttcaagtaactcttcagcagtagcggtgttagttgtaaaaattttattatggatttctttgaagcgttctttgaattcctcagctgcttggatgtcaaagaaccgctggatgatacgatattcacgatatatagcatcgttgaataattcttctgatgggatgtaactacgtttcataatattttcctcagtgatttaggggaaattatatcactataactttaagcaagaatcctagaatcatctccaagcacttcttgattaaagccatataaatccattcttataaagaaaaagggacccggaggtcccttagattaccacaccctactaactcgaccataaacctcatgtttagaaccatcaatgttttcaacccagatggttacccaagttccgggcagaggtttcttttcagcgaacagatatccatagtcgcctgagatcaaagtaatccaataacgttgcatgttaattccttctaagtaagggcaatagtacccttactatttattctttattcactcatccatgtcttacgtggtgcagcatcgttacccataattaattcaaacagttctttccagttttcaggaagagatactacatcataaaccgggtcttgaataacacgttcgtattcatcttcttcaagagagccaagacctttaatataacgaagtttccaacctttgaaatcatctttatggtcttcatattcaccaagagaatagaaccaacgttgttctttacctttggtgagaataataaccggagttttcacaaagcggattctaccctgttcaaacagttcaggccaattactgaaaaacgctaaaagacttgggaaaattgaaccaacaccatcaacatccgcatcggtcatgatagcaatatttcggtagttagtattttcagcaggctcaccaatcgtcaaaccggtgattgcacaaatgtcaaatacttccttgttcttcatagcatctgcagcagacattccccatgtattcatgaacttaccacgtagaggatatccaccatgaagttcacggtcacgagttgtgagtagataaccaatcgcagaatcaccttctgttaagaacagagttgtgtcagcatctttaccatatttgtttgctttgatgtgcttagctactttggctttctgtgcctttttagcagctttagtttcagcagctttctctgcagcaagtttacgagctaacattgcctcaataataggcatatgaatatcttcggatttcataatagcgttagcaagtttcttataatcaatatcaatatggctacgaatttctccccaaggagaagtcagacgctctttagtctgagaatcaaatcgcatgttagacatgtcacgaataaacataatgacagtcagacattctttaattcgtgctttattaacttctagtttgtacttacgttttaatgctggaataagttcattgctcagttcatcgagaactaggtcaacgtgagtaccaccatttttggtgtgaatgttattcacataagaaagttgacggaacccgtcatccgaacgaccaatagcaatagcacaagtatcagaatcctgcactaccgcattttcatcatacatctgggcgtaagctttaaacttaccttgaacacgtttacccatgaatttgaattcaatatcaggataaactactgctaatgtcatcagacgatcgtgaatgattgactggtcaacatcagtcaatcctgtgctttcaaagtgactgaaatctggaatgaatgatactacagtaccagtcttatctttgatgaattctttgtcttttgctggatgttcttcccaggagatattttctgagccattagaacaacggacaatgatttcatttttaccatcgcatgttgcaccagtgaaagatactgaaaagatattagttaacgcagaaccgacaccgttcataccaccagttttacgctcagcatcatcaccaaagttaccacctgcacgaggacgagtccatgcggcgactgggcctggaatagtttctccttcaggagttactaccggagcctgtggaagaccacgaccgttatctgttacaataattttgttgcctttaatgtcaactgaaatcttattcgcgtgtttgaaattagtacgaatagcttcatcaacagagttatcaatgatttcatcaataagtttgataataccaggaacatactttactgattggaatttaccaaaaagaaaacggtcatgcgcttcaaacgcagaactaccaatgtacattccgctacgcttaatgatatgttctcggtcactcagaattttaatttcgttcttaatcattacatttcctcggttagtgaaggaattatatcaactattaattatagcaagtaattcttctttgatatacatcaatttaccaagaacctcatggcctcctttaaccgctttatactcgggatatcgtggccgctgtcgttcaaacatagtccattgagcatcactaacgttagcgtatgcatatcgagaatttccgtagtactgttcaatccggtactcgttgttttcattaagtgaaatccactcttcacagacttcataatatttctgcatccaaatagtacgaccattcacgtcattaattggccaccaagcaaacctatattttccaatagcccgctctaccatttttaactgtcgtttagcacgcctttgcgcagttgtcattccaataatcataatattctcctctggccaacaagactataataccaaaacatgatgtccatgtaaacaactaaatgacccgaaggtcatttattcataacgaattgtgctatttttgagaaaaagccctgagcatactgttccgttaacaggttttcctgtaggtccaacagcagtaaaccctgtatgctgaaaatcatcctctgagcaagaaaagaacttatacccggtaatttggatatcagtaaatcccgcgttatctaacacacgagttgcgttatcagcgtcaatgcatccaatcatcatgaaggcaagcgctgtaattaaaatctttttcattttaattttaatttaaccctataagttatattacctactttaataacccggatttctccgggtttcatggtaatgcgtgctttagttcccatcaataatcaccactctttaatccatcgtagtgaactgccggagcagaaactactcgcttcatttgaccttcacacttagggttaaagcagttaacagtatagtcacgatgggaaattttacgcataatttctatcttttttccacagacttcacacttgtaatcatacattggcattaacagcatccttccatttttgtgttttgaccatgatttgctcattcagtgcacgagtaaccatcatggagatttcatcatctaatacatgcgcatcatctttatgacgatttctgaaatgaagccaaagtgcatctactacacagttaataacatctgcgcactcgccttcaaattcttctttctgccgccatggacgattaatccaatcacacatttctccagtttctgaagaaagttgcagcatgacattcccaatgctacggttaggaataggataagacagttttgatgcttcaaaaataggagctaaatttaacattgatatgcactctgcagtgctgcaatagcagcgattgcttgaccacggttatgaatagaaagattcataaccaaatcggttggaattacattcgcagaagttccaacttcagtaaagtatttgaattcgctatcaaaaattacaaggtcttcaccgccgacttcatcgcattctgtgccattagcccacataattcctgatactctattattttggtggtcaactttagtaacagtaaaactcccgccattttcatagagttcaaacacaaagtcttcattaacctcataacgtgaagaaaattcttcttccgcttcatcattgacgaatttgtactgtacgccttctttaaaattcattacacaatctccatgtattctgggccatcaactgtgattacacgagcaaaggtacgaactgggacgatatcaccgtgattcgcgaatacatacaaccaagtccagtgctcttctttaccgaaggttttctctttctgaacgacgattaagtccgggttgaacagaatgtcttcaaaagcttcggcagtaatttttacggtgttttcagttttcatgctattctcctcagtagttgataagataataataccacatccttgtggtaaagtaaacaactttttttatactaaacctggattttgtgattctgtcggctctacatcggctttaggcagaactgcatagttgccttgaaacactacgtttactagggttttaccgtcttcttcccactcatcagtgacaagaacatttttgtgcagtgacagattagtggctgaattagtagaactcaccgattgggtaataacattgtcaagtgaattcacgtgtacccacttgcgcagatagctttcgttaaacatagaatcaagcaaatcacgcgattcgagagcaactacgaatttttgcagcgaatacacggctttgtcttcattttccaattgaagcaaatatgaagacattttgttagaacggttaaagattccaacaattacgccttctttaccgatatgcttaccaccaatcactttaacgttttcgcctacaaccaaatttttcatcgtgtttctctcagtttgttaatgtagagccattatataacggctctttcataaagtaaatagctatcgatgagaaatttcacacccaacatctacgccgaacatatatcctgcatcccagcctttagccatcaaagccttggcaaccagaaccatcgttggagagatttccgggaggatttcccggttgaaccactcttcgaagttttcgtcgaattcaaaatcttccattagccacgccccttaggtaaactcaaaggatcggtatcttctgggcttggtgcttcgcttagacctagagcataacgctgagcgtacttgagcattaaaatatccttagcgcagtcatggatactatcatgcgcgataaacccgtcgagcgtaccctttggaagaggagtagttgtcagaccacgagtcagaagcagcgattcaattgcagtacgaatatcacgctgattccagaacttgcatggttcttctttaaatgtatcaatttcttcttcggaaattccttgggctcgttgaacatcgcgaagacaatcaacaaaaattggaaagtcaaagctctgtccacgacaccagccaaaggaatcccatgggtgaattccattatcaatcagatattgctgagcttctttaattccagcaattactgataaatcatctggcgttgaggcaaggttagcccgagcttcagctgattgtttcttccaccactcaagagtagacttaccaaacaaccgatgacctttctgggatttaaggtcaaacttgatacgatgaccacgtttaaccaattcatcgaagctttccaggacttcagggtcagaatcaaaggtgattagagcaaggtcaatcacggaagagcttgacacatttccgaatgtttcaaaatcaataataaagtctttagccattttgagcctctagcataaatttaatttcgcgtaactggcaaccaatatattcgctcagatacacctttgggtcatatcctgtgaaccaagtaatagcattagcattatctgctatatcacgaagctcattcagaactgtatcaattttaatgttaatagcacgcttaacattatccggtgcttcaagcttagattcttgtaagccaacaatcattgtttgaaggtcttctaatttcaattcaaacatattacctcacacataaaatacatcatatcgaccacgggtagtaccaacatataataactgctgtgcgagagaagcatctgccatgtgaatgcatggagtataaatgaagcttctgtcaattgagatgccctgggccttatggaaagtcgaagctggtaatgctttcactttatggaacttacgcttagcatcccagaactcagaccaaggagctttacctcctttattccaattcttatatgtatctgcagtttttgccaaaaagaattgaaacttattcatttcttcttcggatgagatgacacagattttctctctagcgtactcttcatcgtcgccataggtttcaatatctaatacccaatgacgaaccagatattcacccggaacacctctggcacccaaaaatgaagtggtttcaactgcatctaatatgcgaacaaactgaccattattgaaaagaatttcgctgaatttctttccttcaaatttaagttccttggtaagaggttcttgcataacaacaatctcgcctactacgaatggtcgttcagtttcgtatattcttcgtctgattatttcattcaatttatccacagatttattagtgaacgcaagcattcggttttcaaataaatcttctggtgttttaactaaattaaaataatttagcataaaatctttaagggcagttcctttcgtaaacccacggacaccatgaccatcaactacacagtcgcgaatccatccgccatttctgatttcagtagcaacttcaatgattggagcattacttcgcatcacctcggtcaaatgaagctgtaagaaatctttatgagtgaagaatggactcagtgcaggttcattacttccaggttctaccggacgtatttgagccttatcaccaatggcaatgacaatacaccaggcaggaatagttgccatcaaaatcttaaacagcttacggtcatacattgaagcttcatcgcagatgagaactcgaatagacgccatatctggaactttcttttgctcaaacagaacgttttcttcatatgtcgtcgggttaattttcagaagactatgaatagtactggcctgcattccgctgagcttagataaaacctttttggccccatgcgtaggtgctgccaacgcaatgccagagataccctgagaaatcaaagcgtcaatgataaatttggttaaagttgttttacctgtaccagcaggtccattaatcgtaatatgttgacctttagctccttgtttgaccatttcaatgactttattaaaaatcgctttttgactttcttttaattggtcaaacgtaatcatgccacttttaccctcactacatgtagatttttaatttttgctttgagtttttcacgctcaacatcgctaagtggttcatacactagctcagttgttttccaccaaagcattcctttggttttgcttttcccagtaaaattaccttttgctaatttgtctgttaaaaccgacattgtacgaatccgtgctttattggctgattcttcattagtgaagactacacatcgttctccatcatacatatcagttgtgactggatggtcaaatccgtctttatccttatacgctactacatatccatagtgttgcattacattttacctctcaaaagttggaagaaggacgcagtcaatggaagaccttttttcaattttaacttatctaacattgagcattcttctaaccgacgaagtgagttaacaattaaccgtattgattgtacacggatttcagcatctgacggacgattcggaactgatgctaaaatagcagataacttacgctcaactttagctaattcagacttaccaccactgatacgagttctcaatgcattaataagttctaaatctgccgaggttgcagttccattcttttctttttgcacaaattgagaaagatgattttcgcgattacgtaagttagttttaattgatgtgatagttttttcatactcacgaatcttttccaaacgagaagcttctttatcacttgttggcttaacagaatctgaagaacgaactatgcgtgctgcgatttcattcgcttttcgttcaaggccttcaatagtgttatttccacgtaaggtattatacttttgcttgacaggaataacattccctactacatatcccaagtcattattccagcgttcaagcgtcatgctgtcaggatggtttcctttgacggttccaaacttttcgcctgagtatgcgcaatgtgtctgctgcatgatgttaaacagatattctggggtgagattgaactccttgtgccgacgttgagcagaacctaaagttgtaatcaggcgagtataaatcttagcggtttcagcagtgaatttcattatgttttcctcaaaaatgctttcgtcttacggacggtataatgggtctaggtccctagttctagataatcactagttgactaagctatagtaacactaaagtagtccataagtaaaccagattttttaactttgttatgacccaccactttgaacttagttcccatcggtagcatcctttcttgttctttatcaatcatctcgatgtcagcgcttctgcgctgagcaatgttatcaatgttattaatgttatcaatcacattatttggtcgcatgaattcagaatctggtgcagtaattaaaagcgatttcatgttggtatgataatcaaatgattgctgacaattattgacttcaatgactacaaaggtcgagtaatgccatttgcctgcaaactctcgggcgatcgtttcatctgttgtgaatgacgccacctttccaaagtcaaattgctctcctttaataagagcttcataaaaggctttagcctcacggcatgatagacctctatagagagtgtctctgttatcaatttgatggcgcctaacgatagagtcaagtttcttatgaaattcttcgccaatcttattgttcatgcactgccacagaattgactgttctttgcagtcaaaacgattggctaatgcttcccatacgcttaaatcatataaaggtaatcctttgctttctcgcgcgaagttaagaacatcaatggaacgaatgggttcttcgataggaataacctttgataattttactgaaatagatgggtttaatgaaatagccatgatattctccatttttggttacgagaggtatcttatcatggctttttagaagagtaaactactttgtgaaattattttgcccacggagaccagggcggcgggtcagaccagattgaagctagttcatctagaagagcttctggggctttaataccatacttctgtataattatacggtattcgtctttgatgtccttagaaatcactggatgaacttgaacctcttcctgaggctcttccatcatttcaaacaaatccatcacatgaaccactcagtattgcgatacagacaactactgctgttatatccatcagctgctttttgtaacagcgggcttggagcaagtttgataaaatctgcgcccatatataaccaaactaacttagtaaattctattagagaatctgtgctatcaacgataatctttttgcctcttgaaattatgtcattttcgtattcatataagctagtttcatgacatacattagtgtatcctttcaagtggagagcatgcagtatagaaacaggacttcctggaactgtatctacgtcaaagacatgggcagtcttaataattccataatcttcagaaggacaccaaccaaacgcctcgaatttattaactaagtctttgaaatctttgtcgaacgtactgtatagagcaacagtaaaaattctatcttggtctagacgcaaagctccttttgcatcatttcttgattgaactgcgcgttgtaagcttactttatagatttttgcgttatagatttttacgtttgccacacatagctccttcagtcatgttgttgtcttcaaaccacttatcatttgctttaatcaaagcaggcgcagctttaagcaataacgctgcagctcttacacctctgtaccaacaatcaaaatgagacttctttaatggtgattgataccagggcttagtataacatatcattttgttctcctcagttagtaggaataatatactattcccaatatagcataaaaggactcccgaaggagtccttaattttatacttcgctgtcagccggaacagcttcaaacattttcgcgttggtggttgcccaagttgcagcatcatcaactactgttgaataagcagctttttcagatgggaaaatctgatactgcgcgttagcaatacgatgtgaatcagaatacaccttaaaagctacagatacttctgtacctttaacttcaccatcagcagttgtatggtcaaaagttttgatgtttacgtaagccattatattctcctatttaggttacaggagtatttatacaactgccgtaagcgtctttaatatttctttatcaatttctcgagtgatttcttttcgaagggccaatactaaggccctttctttttgttttctgataatttttaaacgacgcttagatattcttttagccatcagtaaccactgtcttggcgttcaaaattatgtttgtttttcagataatacagtttaaagatttcttctgcatctaatccaagagccatgaacatattcagaacaaagtgcaggatatcaatcatctcgaatttaatttcaagctgatctttatcagacaagtctttgatataagtttcctgcatcttgacgtggtcggctttccatggtttccatacggcagatgctgccttttcaccgttactcataccgccaagagacgtcagcaattcgcggaattcgtcatcaatgtagtctttttgattacgcagccattgcacgatatcaccagcttgagccaattcatcaggatgcatgttagtaccaggcttgtcatttgcaagacgaacctgaagagatttttgcatatcaagcattacttgcagagggtcaccaccaactttgcgtacgatacctgcgtatcgagcttcagctttatctgcaccggcgatcagttgactacattcgttgaaatgtggcatgttatttttcctttcaattaaattagataaatattatatcacttaacataaatagcaggaggattcatgtctgaagtgaaacgagaatgtaaagacaaaggaggatttggaagatatctttacgtcggaatcgccactgctgctttagctgcatggaattatgtggtagttccattagctagcacacacgggctagttcttcctccaatgccgttagaaaaagttgtgtcgtttattatgactggaggattgctttaatttaaggggctttggcccctatatcttcgcatatttgtcaagacgcaatttagccattaaaccttgcgatatattttgattaatataatctgttatttcagaagcagttgccccctctttcataatcatatcatttatatctttacttttccaaggcgacttatcccagaaaactaccttttcgccagcatctactaaacgtttcatacgcttaatcgtatcaggatgacgaggttcatggtccataatccatgctcggttatcatgacatggaacttgagctaaatctaaagacccaccggtaattgcaatagcattatcaatgaacaacgaatctattggtccttccatgacgaatacgagttttgactcgtcaatagtgtcgagaccataaattttggtcgcgtgttcgtgggctttgattgtgatgtatttttgtggagcattctttcgtagtgctcgtccttgaaacgactcaatctctcctttcttgttgaagataggaataaccaaacgtggttcgttcgtctcattcttataggttcctggattaacggagttaacaagagaaggccattggttagtaaaccataaccttttccaagaagtgcttggaatacatctggcagtcacgtatttaactatcggatgttccttaggaagtctatctaatcgctcacagaaattaagtttttctattacggggagttttgcattaattttctcagacggttctacgctctttggcttatcaaagacttgctcctttcttttctcaagaagatactctcgatagaggtcaggttcattatctttaagatactgcgatagccacttgttatactcacagttgaagcaatgacaacgtaatccttggcctgcgtcaaaaatccagaacctggctttattcatatctttctgtgagtcaccacaaattgggcaacggcagtttaatttgaacgttgaagacgtagtaacgtgtctaaatttaggtaagtgtgatattgcacgaattgcaaactcgttgtcaacccaagacataatatttcctctggccttaaactaataaggccattttatcactttttcttggcagcatctttatctgctttccgtttctttggaagggtttcgggtcctttattgacaatgtccccggaagtggtacctgatgcaatattctgtggattgccgccagcatcacctgcgaccatttcagtaacaaactctttgtatgttttcatagagcctcctactatttattcatgcgtaatacgtaagcatttataagtaggatacagagtcggagacattgattttggattgtctttgataagcataaactgcttgcctgtatcttcacacttttgcttaatcacggcttcatctttaccagtgaatgccatcttttcagtagacattccgcctgaacccgtagatagcgccattactaaaacgtatgtaatcatcctaaaatccacttaacaatgttgaagttatcaaactgagcatcacagtaaagaacatagttcagcttaagtgctgcgccgtcgtctttaagttctgcttgcacttctgattgtttacttgggtctacgttttccacaatatgaccaacatctgcacgaatctgctgagctacttcagactcatcagcagtcattgaccactcgcacaggtctttgtcatagttggccatagcaggaactgcagagcaacttgatactgcgaacactaaagcaagtacaatctttttcattttggtttcctcaagcagcttgtacgttaagagcagaaatcaggcgataatcaccgtttgcgtatactaacattgacacattgccatcagtgtttttgaatggctcaacaactactaaaactgtatcgccttcatctaatgcttttcgtactacgccaccacaacgcagattagcatatggagatttaactactttgcttccaactaccataccacaatgcggtacggtttccgctgattcatctttactcttaaagactacgtctaatgctttttcaattgtccacatgatgttttcctctactcgttttgtttcagtaaggccatagtatcatggcctttgaagaaagtaaactaccttttgaacaattttttcaacaaaatgtcagaggtcagattcttggtgggtagatatgtagcagagttaacccagatgccatcgctgtcatacaccttgacctctccatagtcgcatacagataggtctgctttgttatatgcctcaatgcctcgatgaatggtatctgtggctgttacaacaaaagagtgacctgactggtcacggaccgcgctaaacacaaaaatcataaaatttacctagaattttaactcttctgccagagcatcaagcttagaacgtgatactcgttcttgacgattagattcggctacacggttctgtgcacctgcaccttctcggacggtattggttggattaggcttagttgggtcgttttgcttctcaatttctacccagcgttgattagccttatgcacgcccataaagaacttattgttgatgttcttatcgccataacgtgatttaatctgcttaattaactgttgcttcatctgagcaagttcaggggtttcaatcacagctaacataaagtctgccgtagcaggtagacccgcagattctgcaatatcactcatgtccatatcagaagcatcccaagctgaacgacctacctgagccgcggtccaaagaacagtttcagattctacagccaatgcgcgaagttcttctgcaatagctttaactaacgtgtaactgttttcagtatattgacgaatacggcaagaagcacaaataccaagatagtcaatgatgataacagtcggtttaaagttcttcttgagtttcaactcattcagaagagctcggaatgtattagcgttagcaccgccagtcggatactgtttaatgattaaacgaccaagagtactagaactacgccatttttccattttgcctttatattcggcgtatgatacacaaccatcgtcaatatcatcaagtgatacatcgagcaaattagcatcaatacgtttagcacaaacttcttcggccatttccatggaaatataaaggacgttatgccccatctgaagatagtctgcagccaatgaacacaatcctaacgatttaccaacgttgacgcctgccatcaacacgttcagtgtaccagtctcggcaccacctttagtaattttgttcagaatgctaagtttaaacggaactttacgagctttattctggtatgataaccaacgagcttcataatcttccatccaatcatgaccaatatagctatcaaacgatactgataacgcttcacgcatgatatcaggaatagcccccatatcaggaagacgcttatctcgcttatttggctcaagctgggcattagcctgaatttcaataattcgagacgtagcgttatacatagccttttcttgaacgtacttttcagtttccttaactaaccaattcaaatcttcgggagcatcagataacttatcaataagtttctttgcgccttcatgttccgtttcagttatagacgaattatccagtgctacacataacgcagtctttgaaggaattgctgtatattcattaacatgcttcttaattatgttaaacaccgtctgagcaggtccttgctcgaagtactctttgtccatatatggccaaaccttcgtaaagaaagcctggttgtaaatcagattagctaagattgtttctaccactttaacctcttaaaagattttccataatgattttttcttggtctttaatgcactctggatttgttgtttaacacaagcttccacatgaggataaagttcatccttatgagcttcagatggagtactaaactcaatagttacttcccccgaaggagaaatatttaatttatgaacataaaccaagtgtgattgaccatttaattttatcacaatttcttggataacagtcttcatagcttcttggattatttcatgacttttcttgaacactcgttcttgacgctcgaagtctccctcttccgagggagattcttgttcaaatttctcgagttcagattctaaatcaaactcagtcttcattcatgaagttctctaattcatcttcaacttcagcagctgatactgaaccactctcagggagtttaacaccatcaaccttagttgaaacttttgagttaatcatttctgctaccgcttcatcaaccgcagcgtttgaatcaatagcacccaactgatagcgagctttgatagcgtcacggaatggctcatgcttaaacagaggaccccaaaattccgtactgctcgtatcttttgcccgccaggatttttcttcacgaatcatctcaccggtttcaacgtccaggaattctcgtgcgtaccatccatttttcggtttaaccacaaatccgatatccagagccatatcaagcagaccactgtatggatcgataccaccatcgaatttaacatcaatgaagaacttacttttctctttgacagtacgtgatttctcggcgttcaggacaaactgatatccctcaagctcagtaccatctttaatttggcgtttaccgatgatgaacacagtatccgcagaatacataggacctgtaccaccggtcattaccgtcttactgaacatctcgatggtctcgattgtgtggttaaccgcaacgcaaggaatgttcttaatagagaagtaaggagttacgatacggaagagagacttcagacttttcgcacgagtcatatctgcgacagatttctcgttcagtgcatcttcggtttcctttttagacgccatgttaccaatagagtcgataaacacgatgactttttcaccacgctcaatagcttcaagctggttaaccatatcgatttttaattgttcaaccgactgaaccggtgtatgaattacacggtcagggtcaacacccatagatttcagataagctggcgtgataccaaactctgaatcgtagaacaagcagaccgcatcaggatacttattaagataagcactaaccattgtcagagacatgttagatttgaagtgtttagatggacctgcgaagatagtcaaaccagactgcataccgccatccaacgctccgctgatcgcaatattgagcatcggaattttagttctaactacatctttctcgttaaagaattttgatttagtcagttctgctgtcattttagaagtggatgctttaatcaggcgagattttaagtcagacattcattatattccataagtctccattatatttttctcacaggttaaaggatagagtaattatattactttgttcttgaagctattaacagaagttccatttcttcttggtgttataaaccactgtttccatatctatttcatagtgtattttacatccaacacacatgccatgccaccagcaatgcattccatctgagccagtagttccttcatgaacaaactcatcagatttacatacgaagcatctgaattcttcagccttgaatatgttaccagctacatcagatttatcatagatgttcataagaggtccttggagggctttcgccctcacagatatggttctaccttaccaaactcatggaaggcctgagatttcactcgagtgttaatacacatacgaattgatttcagaggttcattatcaccgaataaaccacgtctttcaccgtctttagatttccagcgagcttgatttgggaaagcagcatgtagctgttcaagggctctattctgacgagcagtatcacgctgagtagaacaaccgccaggagactgcactttgccggatttaacgaggtacttaaacagagccagatgaggatgacccatgttaattaattttagaaaagcataagcatcttcgttaaggtcaataactccgtaaccaatatcttctgcggtaagtttagtcaaatcgtagaaagtattggtaaacccaaagctgttctcgcgataatgaccccagcttgatgtgattttgaaaatcggcaagcgagcatgaccgtgataataaccacaatccatagcagtctcgacatatttgaccatatcatcaaatacctcttgactcattgcctcaccgacaccaagtggaacccggcgatcgtcgcgttcacgaatttcagtcagatgaatggtcgtatcatcatcaagcatccaaattcgttgccctgcatacatttcagtaatcagacggcgagtaccagcgattccatcaacatcatcgggaatagtaacaattttagcagcatgaccatgccaggtttcgtatgcttctttttctgattcacgtactacaagatgtggaacataaccttcaggaaacatagtcagggcagttactgccccggcgcgcttataacttggaattacaaactgaatcataatgtacatcctcttttatttggtccatgcctatcatagcgacttggaactattcttttgtggcaatatatacagtaaagttctattctctttggtgatattctaccacgcaatgtattagcaattttatttctactttcttctgaaagctttcttccaatcaatccatttgaaatgtttttgcatctttcttcgctaaagacgaatttcatcccctttgttggagacactcgtcctttaagtttagatgatactttactataatcaatttttgatattctagctttaatatgctctgttgattgcttatatccagatatcgttcttccatttaaccactgggcagaaagagtattaaacgcttgcgcatcttcatatcttccatatttttcatacaattccagatgtgccttagcatgctcttccggagtaagatatacgatattatcatcgtcatccgttcctccagcgtgttttggaattatatgatgacgatgatatccagacttacgtggaatcacttccactcacctttataatctttctttgcaatgtgggtttcacccgtgtgagcataattatctacgagatagaaatgtcgagaatatacgtgcaaagacccgacattccaaataatgtcaccaactgaataatttttacctgatgcattcagaagtttggttaactgttccagaacatagagttgccacgcatagtcattacgatatccaaagacgacatcattagagcgcatgtttacaacagcatgaactttattatcacgaatcagatactgaacattgttagtacacatgaaatcactcatgccatcgcgctcaaaatcatactgcatttgaggccgtgtataaatcataattccgcggcgagaatcaggattactgataagttcttttgcgcagttagcaaactgtgaatagttttgtgttgaccaaactgcccagccatagttagaattaatctcaccgtgtttggatgcaattgctttccaaatagctggagtttcaccaggaatatctttaacgaataaactttgagatttataccactcaagttcacgggcaatgtacccatcattaactgcaccaaaaatcaggttttcatctgcaataaatgatgcacctacgatttcaatagtcttcacacccgtcttatcaatcacaaattctttgttgagcaaagcatcagcgaattcttggcggatatcttgtactgtcattggagttacaatcatgagacctcttatttaacttgctggataataattgtattctgttgtgcgttagaagcagaccaaatcagcgcaattaaccaaccgataatggaccaaccgaatactagatttgtgataaagattccaccccgtgatttatgcttacggctgcaagctacaaaagtcggcagaaaatagataaagataagaatgattaagccaaatactgcttccattttaatttcctcagttagacatgcatttgttgtagatgtggttttggagagattttaactgctccatacgttgtttatgctcattataacttaatccgccattagcaaaatcagttaaacgaatctgatcattcaccgctgcagctttagcagtgcacgtacgttctttttgggttttacgcaggcgcttgatttcttccagttcatgcttattctgctcaatcatgtcgagttccatggcagatagctgacgattaggattagctttttctttcgccaaacgacgctctaccgcgagcgattcagcagagacctggttgctagcacgatagtatcctaccgtaccaccaattgctcgcacctgtccaacagaagaagcagggacaatatcaccatgcggcatttggcaaccagtcagcgtgagagcaacaataacagcaagtaacgatttcattgtaatctcctcagtatgttatttcgagaaccatggtaccacatccttgtggtaaagtaaacaactttttaaaagtcaaacatatcaagaagagacgatttctcttcgtagtctaaccctgccgcttcagacatacccgtcagaggtttaacgaacgatttttggaacagaacactgtggtcaagccacactagaacttcctgtcggatttcttgtggcagctcagtgcccgatggccatgccatgcatttctcaccgtacgggttaccttcacgcagcgggatgaccatcaccttctcgccttccatgattggtgttataccttcaaatcctgcggttgctcggttatatgccaaagcacctttaacgtgatatggtgtacctttatctggatatcctgcgccgtcatcatacttaccgatgttgttggcagtcttaacctctgcgattactttatagtcaagctcacgatactcagactcaaactgcttataatattgctgtaaagattcttcaccttcttgcagcatacgacgaatagattcttccaatgcgttttgaacagcagttggtgtagaactttgctgagtttccatacccatgattttcagatgcggttctgcataacgggtaccttccatatcatacacgttcagagcatatcgtttcttcgctttccaaaatccaccaatgccgtttgaacccaacggaggacaagaaatagcttcacggtccatgaacattaaatgttctttgttgttcatgtattcacacatctcacgatatgattggtcaatccaaggttccattttcttcttaccgaattggttcaggaattctaccaaatcgttagtttctttgaaacgctcaagacctaccttctcgataaccttatcaacacaaacgtaaattgagtcagtatcaccggctactacaaatgaatgaccttcagtaccacataccttgttgaggtattcattaactttacgttcaatccattggattgccatttgaccaaacaaagtgattgctgatgcgttacgtaaatcataataacggaagtaaatgttacccaatgcaccataaagggagttgatcagaatcttacggtttaactgattagtattacccaagatttcagcatgtttacattcaaacatcagtttgtcaaggcactcttcggtatatgtcagcagttctgctttcatatcatcagagaaatcttcatagacattaacttctgtgaatttatcgatagttccaaacttcttatcattcagaacctttttaatcagttcttgatttcgtttggcacccatcattttatttttccactctttacgctgataaaataccttcgcgatttcaactggaatgacaccatctacatctttacgatacatccaaccatttggtgaacatgaatattcatcagacggacgaggagcagtcttgttaatgtactcacccaacggatgaagtttaaactgtccaacgatagtttctggtgaaatattgacctgtcggatgattgacggatacagagatgtcaagtcaaacgacatgatataacggtatgcagcaggaactggttccttaacatacgcaccaggatacgactgtttaacgtgagaacgactttgcggaataactttgtcttgttctttcagactgttaaagatgattgcgtcccatgttttaattggactcattacaccttgatatggcatcttcgcataataagacatcgagatagccaggtcaataaatccgcgaacagcatcaatcgcttgtactgattcaacgtcgatgatgttatacgaaatataccgttggtggttagtttcacgcaatttattgatcggaccgtcatatgctaatttacctttcttggtttcataataagcaatgaaatccaacttatacgttggttggttcgtgaaactaaatttcttatacaaatccatataatcaagaatagtcacacccatgatagaataaatttctttatcaccatacatgtttgtgataatcttagatgaaactttattcagaggagagaaccgtttcatcgtacgctcaccaagaatctgtttcacacgattcatgatgtacggaatatcaaatccttcaatgttccatccagtaaagattgctgggcatttctgttcccaaagattgatgtactcaagcatcatttctttttctgaattgaacggcatatatactacgcggtcaagaatatgttgttgaacttcatcaccgccttcagaatctaaacgagcagcgagtttcttgtcccactctgaaacggaaccataaagcgaatgcagtaaatcaaacacatagaacttatcatcaactgaatcatagtgagtgatagcatcaatttcgtattctgctttcatcgggtctgggaattgggatgccgtaacctcgatgtcacagttcgcaattcgaatgaattttttattgtatacgatttctgagccgtatgtatcgctgatataagcaagtttgaaatcatccatacccattgcttccattcccatgtcttccatacgacgcatccaatcacgggcatctttcatagttgggaatgtgttcttcttgcaatacttgccatagatatctttgtacttcgtttcttccatgcaatgactaaacatcacaggagaatatggaatacgacgcattcgttcttcgccagtagaatcgatataacgctctacaatgtcattgcctagagtttcaacgctgatataaaattctttcatgggtttcctttgtttatagaccgagttattagtctttaggtgggataattatactccaatttttataaagtaaaaggcccgaaggccttttcttatgcaccaatcgtatacttagattttaaggtccattcatgtttctgcttgaatgtaattactcggaagttattctgcatctgggcaagagtttgaccacgattaatacttaatagaccccaatctgcaagcagttgggcaattgaatctcgacggatttcatcttccaggtcaataataacaggacgtccatcaagcttcaacatttctttaaaatgcacaatatagtaacgaccctgtttctggagaatgtggcagctttgatatagtaccttatctttgttattagcaattcccatacgagtcagagtttctttaactttcaggaagtcttcaggtttcttcagtgtaatttcaatcatctttaccattccaatgctgttttcttaagagttttttgttctttcaggtttttcgtgattgtcttgagcaattcatcagtcacaagacctttcattttcttgagagcaggtttaagtttatttttggcttccagagtctctctatacatcctagcatcaattgcattgactttgtaatatgacattataacttgaagaatcaatgcatccagagtgttctctgttaacttagcccatttgccataccgacgacctctaggaacagaggccatcatatagttatagtgtgcttggtcagacagtccttgaccaacaaggttcataacataaacagcaggcatacagtcggcatgctgagaaagagcgttttcaaccatgaattttgaataatccatagtcgagatgttcaaatgctctttcttttcattaatagaaccgataatctcgaagaattgattttctgccttttctttatatgaatcagataattcctggactttcgcccagtctttacctaaccacgcgatttggtgttcattatactgatcatcatcttcaaataaactcatcatttccactgcatctctacaacaagttgaataagcatataaaccaaatgtaattcaatcgaagctgctacaccatgatactggttattttcaccaataatttcatacattcggataatacttgggccagtaaccattgtatacagttccgaagaaagtttatctacgaaccaagtatagtctgcagcatatttcggagcaagagcacggagttctttgatgttcttggttttaatagcttcgatgacatcttcaattgagccgcggtcatttagaacaatagacaagatacctgcatcaatcacacctttagaagaataatgatcaagcatgttgatggtcttacggaattctgggaaattctttttgaccaaagcagctacaactttcttatcttcaactaccacgccttcattttcacaaattgcgagacaacgtttaagcatctcgatttgcattggcttaacatcagatggagatggtttaccaaaattaattacacggcaacgagactgaagaggtttaatgataccgtcaagattgtttgcagtaatgataatagtacagtttgtgctatacgcttccatgaatgaacgcagatgtcgttgagattctgcaagacctgctcggtcgaattcatcaatcacgataattttctgcttacctgcaatggatgcagaacttgcgaatgcagttaacggtccacgaacgaaatcaattttacaatcagaaccattcacgaacatcatttcagcattaatgtcattacataatgctttagctactgtggtcttaccggtgcctggagaagtactatggagaattaaatgaggaatttttcctttagctactaaagccgaaaaaatttctttatcttcagcaggcaatacacactcagaaatagtacctggacgatatttctgttcccacataaagtctgcttcgtttactgtcaatttcatttatatttcctcattcagattaaagatggggccgaagccccgaatttattactcaaagtcaaaggtactatctgcttccattgctaccacataagaggctgatgcaccttcaaattttgctgcagtctgtttcttagcaccgttcatttttgcccacagcatcagcttgtaatcaccaacagtcattttcatattgctcatgttgatgatgaagttgaagttaccttcgccatcataatcaccgagcgtcagagaatacttcggacgagtcagtgcagcatcttctactttgttatatccacgcagaacaattttaccatcaacattagtgatagcaattgtgtcaatctgcataccacgagacactcgcatcagttgctgcaggtcttcacctttaaaatcaataattacgtttgctaccgggaatgggattggtttagtagggaacacgattgtgctcggatcagctgctggccagaaaatagtggaacgagcatctttaattgccaggttaccatcttcctgcatgataatatctgcatcgtcaccaaccagagacagaatgctaaggaaactgtttaggtcataaattgctacatcagtatcgatagtatcagagattgtggcttcagcataagtcgtaccgttaacagcacgagtcatgataaaattgccaggtttcagcatgatgccagagttgatggtggagaagtttttcagaatgttcagagtttctttagagaatttcatttcaataccttttaattaagttcaggataattatatcaagctgcgaatgtagcagttaattcttctgcaacaatctgacctgccgcaacgagttgctcatcagcatctacgcagtaatcattttctagacgttcgccaccatgacggtcagtaacaattttagcaccagccttgattgattcgttgtaatgcttacgcatcaattcaatccatttttctgcaacttcgtcgtcaatagatttatagaaagcaaagcgagcttcagaatctttaatcttatctttaatagctgctttagtttcttcagttagagccagaacccaagatttacgaatacgattttggttattcgggttggaatctgcacgtacgtttttaacctggatatctttcacatcaacaaaattaatcattatatttaccttaatcgtaataatcttcaaccatccaaccgggattcctgctggacatgactctattatattcatttcctgtaaaagcatctcgtaacatttcttctgttactaagtgcttttcatcagaaaacaaattagttaacacatatcgctttacttcaggaaaggccagcagatgctggcccgtagtaaactcattcattccatcaccgtgaatcgtccgaccttcttcatttgaaggtgttggccatatgcctgcgggtcatggtcacggtgagaaataataaacacattagcatctaccatcttattcagaatagcagttattgccttaacaccttctgcgtcggtagccgagtcatagacttcgtcaaggaacaaacagtttattttaacaccagaaaccttttcagcaatatcacgccacgtgaatagtaatgctatatcgattcgagctttttcaccttgactaaacgaggcataactaaattcttctcgtccacgtgatttaatcgtttcagagaactcttcgttcagtgtgaacgaataatcagcttccataatttttaggtagctgttaatttgcttattgaacatcgggatgtacttcttgatgatagctcctttaataccggagtctttcagcatttcagttaaaatacctcgacgatatttttccataaccaaattagttttgacgaggataattttatctaattcttcttgtagcaattcaatcttgttagagttatcaatgaactcctgtgatgctttatcaattgctgctttaatacgacgtgctttatcaactgcagttaaagtcatctgcttcaaattactcatttgatttttgatgtctcttgcacgcgtacgaatagtattatactcgcgagctagttcatccagttcactctggcgcgtctttaactcgccaagaatggtattacattcttcaacatgatgattaatcttagtgattagagtgtcattagaatgcaaatcctgtaagcacgttgggcaatgaccacctttatcatacaacccaagaacctttgagtatgattcaattttagaacgaatcttaaaggttttaccttgaacttcttgaattgactctgctgggtcatcaccaatcacaagttcaagcagttcgctttgaagagtttctaattctgctttatatcctcgtgcctctttcacttgctcatcatacatcgcctgcaggcgagctacgttatcaccagaaagtttcttctgcttttctgcgtactcatgatgagttttaatttcattggttaatgcttcacgacgaacatcattaacttgaatctgctggttaatttctctgatttgggttttattcagtttgtccatatcagccaggagagacacctcaagtaggtcttcaacgagcttacgtctattcccagtggacaatcccatgaatggagtatatccagcagttcctagcacaacaatttgcttaaatgatgagtatgacattccgatgaggctttcaaagtatgattggaaatcctttgaacttgcagcctcatcaagcttgtttccatctcgtaaaatttcaaagacgtttggtttctgtccgcgctttatgtagaaactatggccgtcatactccatccataattctactacagagtccttcttattaaaggagttaattaattgacctttcttaatatcgcgaaatggctttccaaatagagcaaaggtgatggcttcaagcatagtacttttacctccaccattcttgcccgtgattaaggtcttttgacatttatcaagttgaatgtcaatagccgcctggccaactgacattatattcttatatttgacacgatttagtttaaaagtcttcactgattttgtgcctcaatatataactgtttagacataacttttaaggccttgatgtcatctttggacaggtcttcaagtgcttggatatattcttccattaaatccaataagcttttaacttctacttcttcaccgtcttcagactcgaccgagttatctaccttagaaacagttcttaattcatgtactactttttcgagttcggattcaaactttggaagattttcatctactgcagtaacaataattcgcactgcaagatttctgaactcttcaaaatcaacttgccctgtgacaggataaatcaattttctatgccaggtgatttcattagggacgaaatcaaaggttgataatccagtgtcttgaacccagaatccgcgtgggtcgttctcatcacccgcagtaagcgtccaaggcgttccgatgtacttaacgtttgctgcgcttgagatggtgtggaagtgcccagaccaaacttgcttgtactttttgaggaaatctggttccaacccatgagatttcatacctttataaaaatagaagccattaagctcccagtgaccaatgcagtattcagcagacgattctttgatatgcttcataatttctgatgcgttctcttcacacatccatgggcacaagtcaatcaaagtcccatcaaaatccatagtcgtaggtttatcaatcaccgtgatatggtcatacttaccaagaatttcagttgatgcattgggtgtcaacgtattcttgtagtgcatatcatggttgcctacaatagtgattaaattaattccttctccttcaagggattcagcaatttcacgagcaaattccattgtcttatgagtaatggctttacgaacgtcaaaaatatcaccatactgaatccaagtagtgatttcattttcttttgaatattcaatcgcctgttgaattccatgacgttgaacgtcttgaacccacgggtcatcgttgcggacacctaagtgccaatcgccagtatgtagaattttcatataacctctctagtagagtttaattttatattatcccatgaatagcaaaaagggcccgaaggcccttacttattttgtcattaactcaaattgttctttaaagcaatgctcagaatcttggtgttctaccaggaattcatatgctttatttcgctctttatcatagagcttccggtcagatgacagatgtttcattcgttcaaagacttcatttttattttcatcattcaaccacaaaatgccagaatcatgagaagtcaatggctttccatcaactcggaatttcaaagcatcaccggtggctttatggaacacgggaatagttccgcaagcacctaattccaagtgggtatattccagtgagcgctcgagaaatttatctggaagacgtgacaactgatagccaaatccagactgagacatacgctcaagcatctcagagttaacataacggtcaagaacttgaggatttaaacctgggccagttttaacctgatgataatgacggcaataatcaatttcatagcgttctttaatgttaataaacgcaggactgcgttctaacccttccaagatagtcgttttgcctgcggggcgcagatgactttcatgaaagtcaaacatcaagaaatagcctttccacgtagtagtacgaccaatccaacggtggatatcaaaatcaatggcagagaaatctttccaatacttatcacggattgttttgatgttcatggctggttgaaagttataaaccggaggcgctgaatcagaatcatcaaagaagctcaatccgccgcttggaaaatattcttccattaacacggtgttaaaatcaccgttggagctatgactaaacagaacatcggcgcgcttaacagtttcttcaagaccagcgtttctacgcagtgacaacgctctatggtcatgttgatacacgactacccgaacttcaggtttaatgttctctacgagcttcttatagttatcaatcgctgcttctggcgcgttaatagcaggtactgagttgatgataagaatgtcacatgcgttaagcagagataaagtcttatcgtagtcatctgcaagagacacaggaatagttacatctttatagctatgtgctctattacgagtaaacgctttatctttagcgtaaatgatatttacttcatggccatgttttactaaccactcacggtgctcgagactgaacttggttacgccgcatccctcaagtccgcgagccattaaaatattaatcttcatatattgacctttgttgttaattttggatattttaccattcccgtaataaagcaaaagggccgaagccctttaaattttcttgtatacaacataacccgctgcttcacatatacgcttagcttcttcaaagcgtctaagcatatctaccttagcattatgaatcgcttcataatcgggagcaggtgcttctctccgagcagtatcacatttataacagaagtaactacgctttggtcctgcataacgttctgaacaattactgcaccggcatgtataatttccttccggccaatcatgcccagggttagaacccatcaaattcgtcatacatcccaattctcttcactagtaataaaatcagggtgttcatctaaatcaatgaatccccagttctcttcgtttaccattcataccaccgtttaacctggaaggtgtcagcccagacaagagagttcttatcaattagcttacatccttcggtagagcctaacacgcgatattgattatctgctacctttactgccatcgtaccagtcgcagtgttcaaagtaaatcccgcgtctttacgtatacgtttaaattttacttgtaccagcatttagaatgtcccaaacagttttacgagaggtattccagcaagtcagaataatctcatcattaaaaggttgttttaaaatagtacgcagtttttcaatagcatacttgtaagcagggaaattgttgtctaataccgcgtctccagcatgagctcgtaatcgctcaagttcacgacggtttttacgaacaactttgttggctcgagcaatagcttgttcttctgccgcttccattagtttctgttgcagctcgtcgcgctcttcctgggtaatattgttcatgttattcctttggatggtaatttatttcaaatgtgaattcggtgtcagtccaattataactatgttcaattatagcagaatctgacctgaaatcagcgtcatgtggatttttcgggtcaatgtgaatatcaagatcaagcacctcccttaaatacatctttagcaaataagggatagcgtctaggtcttgcacatcttctaaaaacccgtcgaggttaatcttcagcctcatataaaaattccagattaggtccatcgcttgtaggttcgctctttttagcagaccctggcgccttataagcggtggattcatactgcgtcattttgtcgtagatgtcctgaataaaggtttcatctgctaacgcaaccatatcatcgtcccgtgaatcatacacgttgtggacaaaatagctgtatttctttgccatttctttgcgttcttttttgatacgctgaacgaatgcattgaaacaagcttgggttatatacgcatgcgggttatcatacttagtttcatcgaagttgattaagcctttaattgcagcttcaatcccgtctgaaatcatttcttgcttccaggattgggtgtatcctgaaaagttgaaacgcttactcagaccttctgcgatcagcataatagcaaggccgatcgtatcgttctgttttactactcgaggaccgccagcagcttcagactcccggcacttctctttccacgcacagattgatttatacagttccttgttatttacataattactcatattgcctcttcgcttcaattaataatatctattataacaaatttgggaagcgagaggattaaagcattacttaatcaattcagcgcatgcaattaatttcatcatgatacgataaaaatcgttatacgtgaaatctaatggaacatcaatgacggcttcaaaatcttcaaatacacgctccattccataaccagcgatatcatctgattcagcataccagtacgttccatcttgtgcaaaagttatttggctattttcaagacagaacacacctttaatattttcatgtgtaagagtcaattgaattttcatagttcacccttcataatacgatagcattggaacagctgttccatgatacgtttgaactcaaccaaactaagttcaaaccaatcagattcatctacttcatgcatcatttccatgaatgaagagtataaactttcataatgagtttcatttaacatagaggcatgcgtttcccaatacatgccctcttcattgtcaaaccaaacacccatataagaatctatagtaaatccgccaatgccttctactacaatcataatttggtttactttagccatgctttcaccgagtcaatagcatcttcaaatttagagaaagcatctacagatgtgtattcattctcaccagagcgttcataaatccaaacgcgtcaaaatcttcttcaatgatgaattccccgttaggagtttcaatcgtgtttctgccatcaggcgttttagatataaaccatccaagcaaaccaacttctacaatttgttcttcagtcatttagaatttccaccaattgattatagtttaatgcctttccagaagaaatcataacattacaaaatctgtataatgcttcttttgatactttatacacataatcagaagttgttataatgtatgaaatacgtacaaatgttggggatttttctgccaattcatacgccagttttctagctctgccaatatcatcggcaaacttggtatcagcaagcaaaatactatcaaatacccaacggttagtaaaaatttctgtgtatagaataaccttacgcatcaagatactctcgcagttcctgctcgtttaacccttcttgccacatctctgacggagatggaagttggctgtctagagtggatgaatcaattggaaatactctgataattacgctagtatcttcatcccattgatttgtgagtatccgtttagcttgactaatatcaggctcagaatgagcccggatatacttaatccttctatgccatacaccagtaggaatagatgcgcacacgatatatgaaatcatttcgccgccttaaccgctttaacatcgcggaagcctttcttacgttgattcttcatcttacgaatagtgctttcagaaatttcaccgatacccggagtgattggttctacaccaaaggctttaatgccaaattcagacagaagataagcaacaactaattcacggatgcgggctttaccaattttttggccttcttctttcatcgtaccgtgaagctcaacttcccactgatcaagcaaagacggagttacacaacgtccttcttccagcattgcagatactttatcataagcaaaagagttcagtacatttttgattgcttgggacatattaatttcctcagtaacgattgttttgacagaggagattttaaatcaaatctcctgtagcaaatcaatctttgagagattttagctcttcgagcatatcgtagtattctttactagcaaccggagctacagtacagtggtagctattgaattcatggtatttcacgaagcgttcaaggtgccacttaatcagattgttaattcggtgaagtagaaccccatctgaaccaacgtagacaaccacttcaaattgaagcccatcccaaattctggtacggacgatatcacctacagcaaaagttttcatgcgatgtaccaatgttcgttttgccaaggctcacctttataccagcgagtcatatcatatccgttctcgtcacggatagcgccattacgcatatagaagtattcgtcatcagtaaaatactcatgctttactttacagcctttactcatagcttctagagcttcttgccaatttaaccaattcatattttcctctcgagttaaacggtatgctgttatccgttgatagagctatagtatcactcatcaactgacttgtaaacaactttgtgaaaggagtttagaataaaagagaggtcccataggaacctctaaatgaagggtatagaaatatacagaaggtggtcaagatgaccttagaaaggaaccggttaatcttctatgatatctgggtcatgcccagcagcaataagattggttttgaatgttggaatgtcatactgcttaacgttatccataaaaatgacaggataccgaatagcaagcgatggatagcacccgatgcgtttagcaagtgactcaatcaacggacggtcataaaccggttggccgtcaacctcgttgattacgttatagaactcatacggaagttgcagcttatcgagcaagtcacgaactgctttacacccagggcatctccaaacttcttcagggatgccatagatttctatcatagttcagccttaatctcagaaatcaatctttcaattaattcaagtttatccgctgtagtcataggataaattttgtcaacagtggcttcttcgagatagcaacggtcagcatcattaagtatacaccactgatcaaaatcatcagcatctatgctaacaccattgaatgtcttaactcgttcaacagacccgtcctgtgtcagagctgttaccaaaaatggcttaaacttgagcatgttgtagaattcaacatcctttgacgacgcgttatttagccatttatcaacagagtcttctttaaacttgtaccacttatcgcaacaaaataattctatcatttcatgacctgttgaagtttggcagtcagagtattaacacgcttctgaaattcttcattagacagtttttcatctttcttagtaggattaatccagtcagaaataatgatgagaacaataaatggaatagctacgaaagcacctgcggttaatgcaaccaaagcgataacgttagaaataaatttacgaatagcattaatgaatttcataattttccttaaatagttaagatgaatgctgtcatagccagaaattctggtccaaacagttcagtagccatgtggttcagagtaaacataattttgtaagtcagcatataaatttcctcaatcatgtgtccaggtagaaccgtttcttacccagagtctttggttatcagaaccacgccaatttttagttgttggcagtgattgctcgtatttcccatcaattataacatcaatatgttgtagcaaatctaggtctttaatatcttcaaatttatatcctgtccacatccagatatctttctccggaaatcttgctttaacccaagaaactaaatttgaaatctcttcccggttctgtggataaagcgggtctccaccagttaaagtaagaccttggatatacgatttgcttaaatgggatgcaagctctttaacagtattcatagtgaataactggccgtttctagcattccatgtactacgattataacaaccttcgcatttatgcaaacatccagtgacgaagagaacgaccctacatccagggccgttcacaaagcaacatggatatattctatcataattcatctttatatttccaagtatatcccttatgaatagattgaattcctttgcaacatttataaacagcagaatgaaaaaatcctgcgtttcttatttcagttgctccagttagttctattgtatttccgtctggtgaatagccaataaccgttttagtgttaaagcgatttctagaactatttttgatatgctctttatgattagtagacaaagttcttcctgttagcccatcagatatcctttttccaaaatcatcaggaagagttactttagacctagctatgctcattagcttcttagttttatcacttctttttgcgccacgctgattttcaaatttcttagcttttgcatatgcgtattgtgaagaagtaacttttctatgcttactattactcattatccaatatgcatcatacatctttccaccatatattttagccaataaatggtgagcagtatagtgggccttataagttaaaaatactaagttgtctaaatcatctgaaccacccatacttcttggaattatatgatgaagttcatacccggctttagtttgacggggcttagatgggtgttcagcagaattaactagatttgaatagattctgtcgaaattcattgaaccttacctcattacgtgcttctacttctgcatcatatttccagggttcatcagtttgaatagccccagccgataatccactttcggggtcacgggttatagcaattccaagcggatgcagaacctctttgttgattttccaaatcaatccccactcgctaagttggttccaatcaacttgcttcattggtttctctaacatgttttaccctatgcataatttctttattcttaccaagattgaacccgcgctcagaaggattaccaagatagccacaagtcctacgaattgtattcatcttctttggatcagtttcaccacaaattgaacatgtgaatccgttttcagtaggtgtcatctcatgggtagaaccacaagaaagacatttatctactggcatattaacaccaaaataatccaacttctcgatagcatagtcccatacagcttcaagaccttcaaggttacgcttcatgtcaggcagttcaacataagaaatatgaccacctttagcaatagaatgatatggtgcttcacggtcaattttttcaaaaggcgacaggttttcttctactgacacatggaagctattagtgtaccagcctttatcagttacgcccttaacatcaccaaacttagcttggtcaatcttacagaaacgatagcacagactttcagccggagttgagtacagactaaaggcatagccggtttcttccgtccacttgtttagcttagtgttgatgtacttcaggacgagtttaccgcttcctttaaaagtaagcatatcaaattcgtgaatgccaatatatcctaatgaaattgaactacgtccatttttgaatagctcaagaatttcatcatcaggtttcatacgcacaccaaaagcaccttcctggtaaagaataggagcaaccgatgcagtaacgccttcaagggatttaattctagttaaaagggtttctttacaaatataaaggcgttcatccaatagtttgaacagtttattactgtcatccgaacttttataatttgcatccagggctatcctagggaggttcagtgttactacccctagattattacggccatcaagaacgggtttgccagaagagtctctccaagcaccaaggaaacttctacatcccattggagatacaggagtttctgaaccggtaattgctctattatttcgagcactgatgatatcaggatacatacgtttagctgcgcattctaatgcaagctgcttaatatcatagttcgggtcttctttacgtagattaatgccttcttctacaaacatcacaagctttggaaagattggagtaattccatcgcgtcctaatccacgaatacgattatcaagaatagctcgttgaattaatttttcttcccatgacgtgcccataccaaatgtgatagtcacaaacggagtttggccatttgagctgaacaaagtattcacttcatattcatatgcctggaaagcatcaaatacgtccttttctgtttttgaaatagcataatcttttactaatgctacttgatatttgcgtgcatcacgtacatgtttagcgaatgtcttctccacataaggagccaatactaaatcgacgttagcaaacgtagttccaccatactggtgagatgctacttgcgcagtgatttgcgccatgatagcggtagctactccaatactcttaggagtttcaatttgagcgttaccaagtttaaagccgttctgcaacatacccttcaaatctaccaaacagcagttagtgaaaggcaaagctggactatagtccatatcatgaaaatggataacaccttctttgtgtgcttccattacagaggcaggaatgacctgattagcgatatgtttagatacgataccagccatcaggtcacgttgggtaggaaaaacgcgagaatctttgttagcattctcgtttaagaggtccttgttggttttattaataagtccctggatttctaattcgatattcattttaaactcttacgaagctgcttcttgtattttgaagcaagttgtgattttccatcactttcctcgtatgtaaacccatgcaattccatttcagcaatcatctcaggtttaccaagacgtgaaaagcgtttagccatatcggcaacatattgcgggtgaatattactgtctttacgattctggcggagatagaccagcaaattctctaaccattcgaggtagtcaatatcttgaccttttaaaccagaacggttgaacttatgcttcatttggccttctgccgcattgcacaggttacagagcaagcctctgacctttcctgcattgtcaccttctaacgcatggtcatggtcgaggtggttcttttgaatatcctcatctaaaggacgtttgcagcaaggacataaaccgttctgtgccttatatagtttttctttttcttctttatataacttacctgttaataacattactcttacctcagcgattagataagagtatttatagttaaattaacgagtaactactatatacattatgattagattctttgatgcagaatgaagtacagaaagcatatatgccttcataatcgtctacagtgaaatcaatgtatgaattagtttcttcatgaagaagactcattttagtccaagccattccattgatgtcatcgtcgtaatagcctccactaaattctactacatcgccaacttcataccaatgactgcgtaaaatttctcttgtaacacgatgaatatcagcgaaatcgagaatttttactgtaatagttttagtaatgcacgatttagacatggcgaactccaagacgttgttcaagtgcgacaatgtaatccgcagctttttgcattaaatcatactcttctgaatcacaattttcctgtccagcaaaggcataaagagctctggtaattggaacgattgcaccttggaaatggttaagtttaatttcagaaatcagaggaacatcttcaccttgaccaatttctttaatttggtgcatcgtatcttcgctgtagaaacaccagaaccaagattcgccgtgtggagttgggtcgttaatagtaatgattttatttgtcagtaaatcaataactgcagtgattcctaccagttcaaggtcgtcttcattatctgcagaaataacttgaaacttaaatcccggaatgaacataggaaattgttcgctcagttcatcatcattctcaataacttcaaactgcttaccaataagccccattcactttgtcctcataatcaagcaattcatttatggtaggttcagaggtattataatcctcttcaggaatagcatcttcctctggctcgacagtttcccaacgagccgcataccagggttttagacctttgctactttgcatggtgttggttcagaatcattaacagaatcatgttcaatgcgccattcaacttcagtgcgagtaaccactttttcatgacgagtaacgatatctacttcaggaggattataataccaatcagtatgatatgaacctgaacgagattctgataccatgaaatgaacaccgcgagcaggataataccaaatttgagtacggtcttgatacttatgctcttgtgtccagtctccatcttctactaaaacaaagatttcttctgcatcgtcatctagagcatttggctgatattcaaaatcatagttggcgtcccaaccaccagtgacgccagcgatatgcttgatttcttttactaattcagcgttagtcattttaacctcgcaacttctgtaagtcttcatcatcaatccagctttctaaaccggatggaagcgcacattcaatttcccacagcagttcttcaattgcttgcaggcgttcaagctcttctgctgaaatagttaccatgcgtggagcttttaaatcgccaatatcataactcatagcttttcctcatgttaatcataatttaaccatacactcgccgtatttccatttagacataactttaactccattagagtaagttacctctacctttgctcgatgatttttaatttgtttaatctcgccggtttctaatccaccatagccataataaagagctacaatatcaccctcccgaaggagggttccacgataatcatgcattgaatttgaatttacggagttcatcaaaaccgccgatatgtgtgccgtcaggagcaaaaatctgaggcatagttaatccaacccttgattcacgacctaaacggcgaagcaaatcactgataactacttcatcaaatacgcctttttctggcattacattgatgaatgcatactcttgtttcttaacatcgagcagacgctttgcattatcgcaaaatacacacttatggatgttgctgtcgtaaccaaaaaccgtgaacatcttcttctatttccttaaatacttgagcttgaactgttttccaacttgggtgtttatacgctttatagacgttagtcattccaagacgcttagtgacttcgccatcaattgcagcttgggcaaaatttcttccacgggtcatagctcctttgagattggaactgttagcaatttgaccagtctcattataataaaccgaatacatgagtagcattactcgttcggcttcttccatatatcgtttacgagccattttcagccttagtagttataactaatgttttaccatctaaagcatcgagaatatctttgatgcaattatctggcattggttgaacgctagctaattgcctagcaatatcatcaggaattcccatgcgaggaatatttaatttgctaaaatcaattttatccattagcagttaccgggaagtgttctgccaatttagcggcgatggcagcgttaatttgatcagcgaaattcttattcattgcgttaacaatgatttcttgaattcggcggttagcgctttcaatagacagcttaatacgaccttcagcttgcttaacagcatcatcaatagtttgacgaaccatatcatcaatagcatttttagcacatgattgggtagcgttacgcatcatgtgcgacatttcttctttagcagaaatatcactccaaccacgagtatggaacatctgctgaagctgtttcttaacttccgctcgaacatctggaatagttactgttgcaatattaacttcagattgtactgcttgttttagtttattctgggaatcttttaacaccatttctttaacgatgttattgattaccgactgctgaagctgggcacgagcttctgtaccttctggaaataactgtcgtactgcatgtgtatcaagtttaatatcaatcattttaattttctctcaaatctgtgtttacaaatccggcatttcattttcagaatatcggttgtccaatcaacaagctgtacttgaatactaccacatttttcacaaggcacaacttgtttagctgcagcttctcgacggtctaccatttcaagacaggcattccagtcaattttgaattcaggtacaggtggatactcaaactcaatttcaaggtcgttatcatcaacgaccatgtcttcttttaattgatttttcacagtaagctccgggcatactcgagagattcataccgctctttgtactcattaagcgatttgactaaatctgccatcatcaattcatgcttacttaattcagcttctttggtatcaataaaccgcttaactgattccatttcggcagtaatactattcttagcgatttcaatatgatttactggtgttaatggaagaggtttaacaacattgagatacatatgtgctacatcttcatcaataactggggtgctcaatgttttgggaaaaatcttaaatgggtccaaatgcacttcaagaacagatgagttttcaccttgctgtttgcaacatgattttttaactacatccatatgctctaaagcagtacgaacttgcgctaaaagcgcccgggctggatactttccgctggacaaatggctgttaatatgaattcgtacagtgacattgtcaagttcttcggcacgaatgaatgaaacacccttaggatttctagaactagtagaagatacctggtatttcacacggtcatcgcctttaagtaagcaaattgaacgattaagaatacgacgcaggtttgcattaaattcagagcagaagatttgggcagcgctacggtcatgtctttcttcagttttaaacgcccctgccgcaaagctataacgctgaccgtaaattttagcattgccgatagcaaactttttgagctgtttctctgctgacattgcacctaaccagcgagaacgacgaatgttttctacaacaaaaccagcataattggcttcatgcgctgccatgctatttagcacacgacgagctacgttaccagcaattgctacattataagcagctgggtttaaatcatgcaaagctgccaaaacctttacgtgcttctcacgctttgacaacccctttccattatgcttatcaaattcaccggctacaaacatctttaattcattcttattcattatcttttcctctattttggactgggctcaaagagtatctcaaaatctccctgaacccattatacaacaattattcctcaagcattataactttgcttgggcgcttatagaaagcatgagttttatcatctttcgctaattcaaatgtagcagtaaactgtactttgcctctgtattcaaacggaatactttttggaagggagccgtaaaccgtagctccattctcaagtacaaccatcatcttacattgtacgccgtaatagtcttcataaacttttactgacgttacggtaccagagacagtcactcgtccttccggtgcatcccctttattcttattcagctcattgaatatattatcaaagacctgttttgaatgttcctggatagcctctaagatgctcttatgggctctaacttctgccataacaacatccgttccgtcttgcaatttccactctttatatggaacgcgtacttcaagaggataaccatactcacgaagttctttgtactccgcttgagttaagcggagtttccaccaaccgtggtcacctgtatactcaggcttatccagcgaatcaaattctgtaacatacggcaagtaactgcccgcgtgataagcttcaacttcacctaattcattttcccaaagataaccatcaaagggagcatgagggcgatcatctttgccccaagtaggagctacagctttatcaaagtattcacgaccgaagcgggtcttcgcccatccagcattcaactcctcggcgcgtttttcaactttcgctcggtgtgcttggcgggctacacgattttcttcaacaagtgcagagataatctcggttaaagttttcattttattctccagtttggttgacgagaccatcttatcaacagcctcgccgaaagtaaactactttgtgaaaaattttctccaaagcagaactgcgtctctacgagatacttctactgctcctagagcaactgcttgcttgcgacgaacatcgcgcaaatcatagtgtggaactcgcttatcctggaaccaagaacgtttcattccgatagcttctgccatagcgtgcaactcatcaaggttgtcgctaaacatatgacaattctttacttgatgacctctcattttccagccatgattcatcaagacatctacgtatactgtcatttctgattctcgatgtaagtttcaatgatgaactgtgctaaacacagaagattatcttctgaaggagaatctactaaattctcaaccatttcagaaatagttccaaaagcttcttcagtattgaacatttcttgaagttcgttccaagtaggtgctttcatttcaatctcctcattagttaacgaagctatcttatcatggcttttctaagatgtaaacaacaaaagggcccgaaggcccttaaaaagatcggaaatcactgttaaaccatggcgactggtgctgtcgccgcttaagcaatttcagttggtatttcctattgtcttctataatcatcttagaggcttttagctcttcagccaatgagacctgtttacggtccatcaagatgaggttctgggtcttctgggcaaacgtctgaatacctttgagacattccacagattcctccatccctcgtttatacttggttcgggcagcatttaactgcccttcgtaatacgcatgtatagacactatagtactaaacaccttttacctcaataacatctaagataatatcttcaacgtcttgctcagggaatgccacgccattggtctgcccatgctgaaacactgcttggtacgctgacggcgcagaaattcgtgttgaacgttctttattgtcatagcatttgccatcaataaagcgtttaaatttaacttcataggtttttaacattattacaccttagcataattgacgatttgctcacgatcagcgggccaatttaaatcagaacgtttcttgtttgaccacgcaatattttcttcagcccagtgaagtttagccgatacgctcttttggacttctctgattgcttcttcaagataaatgcctaaatcccgtgggttggttccttgagttttaaacgcattgagcaaaatatttcttacaacttctttaaattgattttcaacttccggatgaatgaattcgcgataaccattgcatggatatccgaaagcatctaccatacgagtagtactaaattctttgctcataatccgagggcctctcgttcgtcgggatttaatttcgccaaagcggcttctttaattttttccaaccgtttacgcttagcttcaggtgtttcttcctggacggtgatagcagcctttttagggaatgtccatgattcaccattttcatcggtgaatgtaattagttccgttggcttacgattaactgtaccatctgagccccaccaagactgccccttaactgcttcttcggcaacgcaatatgaaccataataaccaaacaactcactacggcgatcgtctggtgaaacatacgctgcataggcttcactttctgtcattacccatttcattttagcacctcataacgaataagttcaatacgatttttaagctcttggtatgatttacgccaaggcttataataggcatttaaatcttggtgttgtttatgcatttcgtctaaatgctttactgcatcctgtacatttgcaaggaaagtatcaaatactttattagcgtattctttcctgagctcaatgaatggaggagcacgaaatacgtttaccattacacgtagttcatgataagaagaatggacttcagctaatacatttttcttatcgccaaaattaaacttataaagcttttcacagattgcttcacaggctttctctgctttacccttgggtttacccgcaaagatatgaccaggcggatatactttaatatcgtttaaccaacattcaatatctttaatagctgctaaactcattgtacccacgctccattttcatcaatgtaattaatccactcgttaatagtccaggaagaagtatcacctttaggagtatcaacgatatacattccgcctttaaacaaaacacgctttacatcattagaaatcaaagtagccattatattttcctcagttagggaggatttctcctcccatttaaattatttcagcattgttacttcagcaatttcacgccagtttttacggtcagtcgcgacgaaatcaccaatataaagagcagtacggagagatacgttacgcagacgatttacgttatctttcataaattccaaaacttcaataacttcggaatttcttaacccacggttctgtaacatagaagtagtcattattacatcttgaactcggaccataatctcttcattagtgtgaacaccaaggtcaagataaaccgaacgtgataccagagcttgaagatgcggagcaagtttagaaccgcgctctaattcacggtcaatatcaacgttagtgataaagaccacagtaccttcaaactcaaactcattaggaattcctttatcttccaagaaagaagatgcagtgctccagcaaactttccgtttctcccctgaatccaaagcagctttcagaaggttaagaatgtccatatcagagaatacatccacatcgtcaatgagcagaactgaatttgcttcacgtgattcccaaagacggcagtacaaaccaattcctgagattttaccgttcactgatttataatcaatagcgttagtatcatgagcatgttgtaatgctttgtccaaagagtaagtcttaccgatacctgctgctccggagataatcagagaacgaatattcccatgaattaaaccgttagtcattaatcccatgacgttaaagcgtttcttgatacgctctttcatttcatcaacggattcaacaacttcaattttagcagctacaccgtcaactgtaatatcatctttgaatacccaaacaccacgctttttaccattcagttcaacaaagactttaccatcaccctgacgagaatcttcagcacttaagctatccgggaaccactcaccgagtaactcatacgtacctgaaatctctttgccgaagtaaatccctttcttgatggtgatagttgacattttattctccgttactctgttttgttttgatggagctatagtatcattctacagctccaaagtaaactactttttaattatttttctaaaatttcattgatgtagtaaggacgaacctttgaaccgagatagaagtcatctacaaaatcaatcaagttgtcagtttcaccacggatgatagcaagtttagagaacgcttctcctaccatcattggttcaaattctacgccgtgagcttcagcagctttaaaggctttatcaatgttgtttacaacgatttctaaagttttcattttattctccgttatctgtttgggtggtacgggtctatagtatcaccagctcgtgagcttgtatactactttgtgcattcttttgaaacaaaaagaggagcccgaaggctcctcagttatgcatgcttattgatagcattttctgctatacgttttggaagtttacctgcccagcggaagaacatgataatcgctccggcaataaacgcagggaaccaaaagatgagataaaaccaatactctcctgctttctcgatggttccatttttgattagatgcttacagacagaccaacccacgacaaagtaaattattgcaacaacgattggcactactacgctccacagtaaaatcatatttcagcccaataaagtgagaaccggagctcttctccggcccatgacataaatcggtggatttgttttcgagttggtcgagcagagaatttagcattttctctacgaccagtctctctgcaaactgcttccaaataccaccgtctacctttatgaggtcttccgtaattcaagaagaccttcattgtatcatttgtagtaagaattgtggttttcaagataaaccttctcgacgaaatcgtcccagaacttcatgtctactttcttaggcagtccgttcttctcggcttgatgagccaggcgttcaactgcgtcaacggtcgtttccaaaatatcctgaacttctttgaacggtaactcacccgctttgattttcttaatcaagggagcctgcgccagaggatacttaaggtcaccggaggaataaatctcctgcagctgaagaccaccacgaagggcatgacttagtgctttccaatctacaccttcgttagcttctgccttacgagcgcgttcgccatattcagcatcaagcttctcaagggagtacttcatttctttaacagtgatagttgtctggaatttacgacctaacacgttatagaaatactgctgacctgatttatggtctgtaaaggttgtccactcaaggaattcaccaacaggaagacgatcggcgatgtccttaactttccaacgctcgttgatacctttttgttgagggcgatcgtcatatttccattcgggaacgtctcggataacatccaggactttatgcaaatcagctaaacgagaacccttaacgccatacttacctgcttgcttacggacatatccaagataagccttcatgtccgtggtatagaaacgagctcggttgtcttgaatgaatttccatacttcaggaaggtcagatgcaactaccaattccgatggagtatgaagcatatccaacgcgacagtttcaccatcagcagcgagtttgaagaagtatttcaaactgaacagctcatggtcaatgtcatctttagtatttttggttgcactgttattcgtattacggttagtatgattcatcgcttgacacatcagaatatcacgcggatgaggaacaaagatttctttgaaatccacatctgattcaggagttgaagtaccatacagatgcgaaccaaaataagattttacgattgttttcataagtagatatgattccctttagcgaatttaactaatgcattagaacgcttgacggcttcttctgctcgagctttatcagtagttctttttgatgtacggtaaacattaccaattttttgactagtgtaataatacactacttcatgtgtatggtactcttgtccatcaggatgctgttcacgacaggtttcttcacgcagtgtggtttcatacataggaactaatgcccaatcaattcctgtgctaatgattgccacctggatgtcaagtctgttccagcgaaacgcattgatatatcctaggacccgtgattctgggtccatcattgcgaatttaatgttttcggctgaagccagaggcatctgttttacaatactcatactaagttttttcttagtagttacgatttcaatttccataccccgccttcataatatatgtctaaatcaatattatctttgccgctgtacttgccagtcaaaggaataaatttaacagtaatcttttcgccgtcatcaaaagtaaattcagcaataggatatgtagaaattataccacgttcggttttagcacgaaagacggcccgaaggccgttaacgatataaacttgatcattcttcactaggttcacctactgtaatatctagcattgatttaacgagcgagatgtcatttgtactaaacacgtgagcttttcctttatcgttctggcaaaacatgcttccatctgctgcaattgctagtacttcatagcagttattagttgtagagaatttatcaccaactacaagaggaacattaactttacacttctcgtaaacggtgtatttaaggctgctgagattaattaccgacttagaaccaccgggtaaaagtttgcagatataaaatccatcgtctgctgattcatttaggtaatcatcgatatacattccacggtagccgtcttttggatatactacagtagttgtttctcggctgctatggtcgtaatatactacgattttggtgtctttacttttaaagaaaatcgatactgtatgcgctgagctacatttgaacgtagaaataaattcaacttcaagctcaagccgattactttgattgtcaaagccaatttctactttatcacctacctttaacggcttttcaacaaggctttcttcaaatttcgtgcgaataaaacgtttcatttatcaccttctacataatcaatcattgggcagactttctgcttacgagcttttaaatactggatgaacaccaaaggttcggcttctgccggaagaccagcttttacccgagcgagtttcttggtatactttttctggatacggtaatgtttaaatttttctaaaccaaaaataaatccaaaagctatagctgcaaacaaaagcataaatgctgctataaccgctgcgccaactggtactgctataacatttaaccaaaacgcggataaactaatacccatccaagcgagaattcctgtctctgccacaatcggccaaccgaacatccatgcaacagaaccgatgaatgtaataatcgccgaagaaaacacaacatgaagaactgttgtccaaaagtatccgcacagtgtttttggcattttccacatgttgtcagatttaaaccacaggttcattttgaaatgccaagagtttttattaatattcattatcagtccttcatagtcggaatcatagttacaagatattttacgagctgttcagcatcggatttatcaatcatcaggatagtaccgttgcgctcaatttcaataagtgtagaaccgtatagctctacggtagtcagatgcaaatcattaatgtatggactttcgtcctcaattactgcatcgcctttacgggattttccgtcccattctaatttactcgccatcttttgcctctatcaagaattgaattaatgaatcaatttgtttagtatcaagatgaattatatcattgccttgttttagcacgatacgactcaactttttagtgaaatacgaattcacaacctttacatgcacatcgctgtacggattatctaaattggtactatcaagaatactttccataattacctcaattgtgaatcttttgaaccacgacgattataagcagaagtcattacactgtcccactttccttgacattctacacaccgttgacagcctttaacaagaaggcgacgagctactgggatttcctcatcacaatcaacacagaactcttcggattcccgctgttcttggagctgtttctgaagacgggcccattcaatcccgtctgctattgtagcttcacgagttgcaaatccgtcatctgatggaccccatccattcatttcaaactctccagaatcatttgcaccaaattatatgtaaacatcggatgctggtattgtactacaatatagatgataagtaaaacgtttctcattcttcgccatcatcaaagtcgtagtaatcgtaatcacaagagtcaaggtaagaatccataaattctttctgacgacggaagtcttcaataggagttaatctgtcagcgtatgcttggtcatctggatcgctgaacttatcttcttgcagttctttaatgaactgttcagcttcttcacgcgtccaaaacccacgattaagattatgcaccgaacgcttttcacctggcttgaatacacccatatcatgggccgaccgttcagttgaataactttcaatttttccatgataattttcatattcacaaatcacctgaaagaagggagatttacgtgaatatacacccaacatgccaagttctacatcatatgtgcctgaagcaacaatataacgcgttatttcgccggttttggtttcagtgcgattaacaccacacacgtgataaaagatttttccaggttgaagctcggtagttaacttaatcataatgtttttctcgtttggttgttgatatgtctatagtatcatgtaatgaagggaagtaaacaactttttgaaaagaaaatgcctcccgaaggaggcggagggtattactgcaatgataacaaatacttagtcttgtagcatagacctgtaatgtcatccagaacactttggagggcggcaggaactgacttgtagataccatcggccttagccagaatgaggtctagcatttcaatggtgtcctttggcagctctttctgtgatggtaaagccggtgtataactcttacctgagaatcctaaccactgctcaccaaaagcatctatcaaatctggaatctcgttaaagaaaacttcatacgctttatgtctggcatacgatttggtatcaaaatgcgctgaatgaaaatacgcctgagacgccataagtaaaccgatgaattcatcttgtggagtaagtttaccgtcctttacaaaatcattgaacttcattatcgagttgtatcctcatgcggttagcatattcttcacctgctgaacgtcctaaagaatcacaatctttagaacaagactcgctcttccatttactttgtatgaaagaatagaactgttcagactcttgcttactaggctccttaaatttagcataaacttgtagagctccctcaacatacgagttataatccgaaatgtcgtcgtgtgatgcagctgggaatgaaatcccgcagcccaacaccagggctaagcaaattggtttaaaggccatacggcctcctattatttttgtccagtattacgtttgtgctgaagtacagccttaacttctttgaggtatttttccagcttacgtttacgggtataatctgcttttgaactgtgctgacgaatttcttcctgaaggtgcgaaataccatgcccaatctcacgacgaagttcgtccagttgttctacagtaagattacgaagttgcttttcacttaaatgctgcatatacacctcatcagttagtaatagtatttatataagtatgtgttacttaatcccaaagccattcgcagatgccttgctcaatggttctagcaccggcttcgtcccagttatattcttcatcatacttcaatgcatgcttaatttcggctttatgaaataaacgcggaactggcattgcataacgggtccaacgtagagttttccagaatccatcacgctttgatttagcgatcagtttcttggcctctaacggtctttccctgttttcagaaatacgcaattctacatatttctgctggttttctttatctttctgagttttaacgtattcgttatagcttttaatataagcaaattcgttattattctgatcgttccatttggaagattttactacatgccagcctttacggcgaattgttctagacattattacctcgttaagttaaattacctcaacgatagtaaaatcctgacttgaaaaattcaatattcatgaatagatgaccttgcatttacattttggacattcaggttctttggttttaagacgcttggtagcagtctttggagcagtgttgtaatcatatacatgaagacaacgataacacatcacatattttttcatattaaaccaataacgaaagcaatattacgtatagtaaaaacccaatcacgagtactagtactataccacccgctatagcaaataggctactcatgtttaatataacacccattcgtattagcaataaagtctttaccctgtgccaatactttacattcggaattaagacgattttgcatttcttctcgtctatcgctttgtatagatgctgccacaccaatccaaatgaatagcatacccataattagcatcaggatagtgttatacgttcttggcttcattataaacacctaccagttcgcaccagtgtttacgacaaagagaaacgtatttgtcttcaccaccaagttctactacttcaccatcggtaatagcatttccgttttcgtcaatacgagctaccattgtagccttacgtccacagtggcaaacgcccttgagctcaacaagtttatcggctacagaaagaagagctttagaaccttcgaataactcgccgcgaaaatcagtgcgaagcccatatgccattactggaacatcatacaagtcaacgattttacacagctgaagaacatgctcagcagtcaagaattgtgcttcatctacaaatacacaatgaatatcacgttgcgtttgtgcccacttgaaaaattcaagtatgtcaatagattcgtctactgtattagcttcatgacgtagaccaatacgagaagtaacttccgttgccgaatcccgagtatcaatagcaggtttcagaatgagagttcccattcctcgttctttatagttatgagctgctgtaagaaggttagctgatttgcctgcgttcatactcgcatagttgaaataaagctgagccattaaagggtctccataaaatcagaaatagcattcttagaacgaatgagttcatcgtattcttcgggtagaccatttccgtaaatggcactaatagctactacttgctcagcaccagcataatcatcaatcaactgccacagtttagttttttgctctttagtaatcatctatttacctctaacaaaacagatttagcttttagcctcttcatattctaccaccataatgtcaatatcaggtgttgctaaattgattaatttctcaattagttcccaatcaccgccagcaataccagctccaatttttggaatgtatagaggacgattataaacaacacgaccagaatttagctcatggaatgcattaaaaattgcaccgtaatcaacatttggacctggcgcatactgagtgtatagattataacaatatgcagtgccattcttgtgggtagctcgtgtatgagttccaagcttagctaaattgttgtcataataacggtcttcatcaatgtcaatatcgagaattggaggatatgctttagcaagttgtcctgctacaccggcacccattgtagtaaagcaattacatccatgagcaatatcgcattcatgcttcatgaataactctacaatattacccttgatatatccagtaatcatttattcacctacggaattttataagttgcatattcattaagattattgtatactcttaaaaatatagcattgttacagttaaggatagggtttaacacgccttgttctttagggtgcattactccgtcaatagaaacgccatcgctctgcattccacatccacgagcattatattcgacgtgtggaactattacctggtcatctttatcttgataattataaaatgacattaacaattttctactgctaggaacaaatgctatttcaatgttgttcttgaatgggccattgctttctattttagtaccctgtgctgcaagtacagtttcaggatagcctgggagtttttcccaggcattaactgaaaatgcgcagcataataaaatagccgcttttttcattttgacgatagtcctgacatataacgagccattaattggtcacgatacattaaacatatattttcgttaggagcattgacacataaatctttcatgctcttagccttacgatttattagtgttgtccactgagccgggctacgtgaatcttttactccatcgctgaatgccgaatctaattcaagcgctaatatatcaacacattcagagttcgtattgcaaaatgttttagcgatacgaagtgaatccgacattgaattttcagcattaacagagaatgccaatactaatccaagaagcgcggcgtactttatcattattccacctttatatgtagcattttatgtttctttaagaaatgagctttctctaggacatctgatgcataagagtttcctcttttgacattccatcctgcgttataactagcaagagcttttcgcatattgccgttatgtatatttaaccaatatgaaagctcaatatatgcccattccgcggaattctgtctagatttaagcatttttcttatttcagaatcactaaggtttttaccttccagtttagctctggctttaaccgtaggcaagtaattttgaaataccccataagaatgatgcccctttcctgcttttaaattggctcctgccgaagattctttccatgatatagcagccattatatatcctaagccgttattatcatatcggttatgcggagatttttcctttccggatttttgatattgttcaccaaaattatatgcgtaatgcaagttgtcaagttgaacattactgaaagttggctcagacccaaaggccgttgaacataaggccattagaccgataagcgcttttttcatgtttacctcaattaatgtgtataacttttgtgctgattttacctttcaaacgtttatcattaacgaatgccatacgacactttatgctaggtccttttcccggtcttggaatatccatagtaaatcctagccacagatttccatccgtaatttctaaccgcatgggtttatactcgatattttcatcaatgtcttttgggtcaattggaagccaaggcattgctaaaaattcattaatttctttaagatgattaggaattttggaaagaacagagaatacatactcttcatcaatttcacgttggatagcacggtccaacaaatgatcagagtacttagtgaagaaaggctctttgccctcagccttagctcgggcacgaactgataaattcaaagagcgaaaagcttcctcaaacttacgacgcagtttagttctgcgaatgaatacttctgggttagttgacatagttcattctcctttgtgtgtagggccatagtatcatggcccgtaaggaaagtaaactactttttaatatttttcttctggacagaacactgcacggcaagcccacatagaagcttccttcagtttttgttttgctgtacgaatctgggcaatacgttcgtatgcttcatcgagtacctgcttgggttcattggctgactcttggtagttgattaatgcctcttcttcaagagcagtaaagataagaccaagacgagtctcagcgtctttgatagcattcactttaccaattttttcattggtatgtggcttgtatcctttaatatcttcgattgacattatagtgcctctgtgaaagtacgagcgataacgtcgcgctgctgttccgacgtcagggagttgaagcgtaccgcgtagccagaaacacgaatggtcagctgcggatatttttccggatgctcaaccgcgtccagcagagtttcacgacgcagcacgttaacgttcaggtgctgaccgccttcaatttttaccgttggctggtattcaatttctacttcacgcgccttgtagccataaaaagtttcagcatccgtaatagtatcttctttaagaacttttgaaacgattactcgtgcgtcatcaccatcttcgatgtaaatggtgcctttaagttcaccttcaagaatttgatatgctttcatatttcctcttaattagattctttattccaaccatgcatgtatgcggtaattacactcattttattccattcgtctgaatgaaactttgcagctgcttctaaataagttattttatcttcatgataagtaacttcttcatcagtttctttatcgtactctacaatttcaataggctcgtcaactccatatccgcgagtgcctatatacgttgtagcttcttcccactgttttgtggcttcattccaagttccgttctgatgggcttcatagaaatcttgctcgccagaattactgaaccattcacagaagctctcaactaaatgtggaggacactttataacaatttcagccattgcattgttttctcttgaatgcgttggtcatatgtgattaagcttgaactaatcacgcctttgagcttgccagatataaactcaattctaaaattaggatagcgattcatccacttcgtgttaggagcgttagaaatgaattctgcgcctttgaacgggccagacagaaacttgtagcgcttgtactcaagcaggttgccagccgtaaccattgttattaattgcttcatatcggcaaatcctgtattttccatcactgtaatcatatcaacaatttctgtctgtgtcatcattgcattcctatcacgaaaaataaaggcaaggtatcattaggcatagaccatctgatagcttcctggtacatatcatagaacttcatcatatcgggaactttcattggttcttcaatgataattaatgctcttccaaactttcttcccctaaacttgtaagaggaatcattggatagaaattctctgattgtcatcggaacaattgatttagctatctcgttagccggtaatttattaattaaatgcgatgaattatattctcgtagaataccttccatcaattcagatgattgtgtgtatcgagtagataagattataaccgaaccatcttcaagcaaccaatcggtagcgaattgacataaggctgtggtctttccggtttgtcttccaccgtctagacgaagggtaccgtactctcgcataaggcaagacggttcataaaaactgtagttgggattattcaatcgtctgtctgcagcgtctctgaaagcatgcatcagggtcaaataaatgggagttaagtgtttcattttagattccagttaaaggggggccattccttggcgcgtgcttagtccgtgtaatattttgataagtatagacaataagtctaaacgtattcccggcctcccttaagggtattcattcgtacttttggtcccggagcagaatcatctacctcgtaagctgccataacgccccaagcctttttaactttagccaaagaacccttagatacaacaatattaaaggtgctgcctttagtaaattcaactgcatctacttgcacgccttgggcaacaatgctttttacgatggcgtcaacgtattctttgtctaaatttccttgtgcaccgatttggaatacttttggtgcttttgcttcggtgataaattctttgtaagttttcattttaaatccaacagaaaggtaaaagttttaaattaaatggggccattccttggcacatgtttaatccatcgacacactatgtaaaccccttaccgcacttgcgctcgaccttattacaggtagggaaagctacttcactcagaggactcgacgttcatgaggagaggtcgtgtttagctttattaggaattagttttaattacgggctgcattagcaacggcgtaagcgtattgaacattagcgtctttaaacgtacctttagaggtatctaaatctgccttaaatccgcctttagtcataatctcggcgaattctttacggaaggccatggcgtcaagatttttccaggctgccttatgcttggcgaattcaaggcctgcaaagttgacagccttagccaatttattatcaataacccatttacctgctttaggtacaaataccgggcctttctgtttagagaatagttttaaattccagcgccgaaggtctgcatcggctttaacaaaagctgcgtctaagttactagcaacaacatcttgaatatgaccaaatttaagcccatcggcttcaatatttagatcgttacgccagcgaagtccttcccaggcgaaggctttaaagtcggaagcctttgtagctaaataccgctcaataggagctgttttagggtcaaaaccgtttcctcggtaggtccactcatctttattaatgccattgacctttcctacagaagcttcagtaataaattctttatatgttttcattttatatcctttaagttgatagaaacattctatcaaagtttaacttagttgtaaatagccttaccataatgtttataccacttaggcttttgagcaattttttcgtccaatcgtttctggcttaaagcaatatccgcctcggttggaacaaaatcgttcattaaacataacggaatgtcatgaacgtcaacacgggtatttgctatagcaaatcctcgttctaggcattcttcaattatttcttgctggcgtaagtataaaaatccaattttatcataaaagaatttcacatgaccagacccaagacgaaaatctttaggaatatcatcgaatttctttccttcggctaatcgcttacgaacagctccgaatacacgaggaagttcacgatactcagccattaagtgctgatcagcaagttcagataccaaagttaagttaatacgtgtcatagtagcctccatttaataaggctactataccacattaccgtctcaatgtaaactacttaattgatttagcgtaacgaatagcgccgcgatcgtttacgaacgcaatcttgccattacgcatgtacatggtaacagtacgttggtaaccgttagaagttttgccagactgataacctactaatgcaaagttatcttcgccaggtttgttctgcttagacttaatacgctcatgaccaagtgccattaaagagcgtgcatcgccagatgctactgctttgcgagaagactcatcttcaatagaagaggtgaaatcatcaaatgaatcaaacttggcatggctcttattatataacttgccgtctactacgtagttatatccaacaacgtccatttcaatttctgtaccatcttctaacgtggcggtcatcttctgaccttttttaaatttcagaagattacttccaacagattcagtcattacgccaactgttgctaaacgggattcatttaaaaattcttgataagttttcatttattttccttgataagcagaccaagttccggtccgcattgtttcaattacacgacgagcacgatttggtgtctgacgataccaacgtgaatttgcaagttccttggcagcagcttcccactttttagcgagtaataacttcattgaagctgggaacccggctacaccagacacacccatttggaataccatgttaatcagagcagctctacgaacatcatctaatacattatataccgggtttaatgtagcattagcaacaatacctttaattgccttctcaacatctttggcaaaaattacttctgcctcagcctgagtaatttgtccacctgtagaacgacctaccagcttgtccaggttagaaatagccaaagattttgacgggtctttagtcagtaagtggccaataccaatagtccaatacccttcggtatctttataaattttgctatcgtatccttcatcaatacgcagcatgccaaaaatatccataaggacctcctattaattataggagtatttatttggccctgcacttggctatgaataattcaaggctacacttctcgtatggcgtccatttacctttccaccacacataatctcttctatcgtcctctggaatttcattaaatcctggacataacttttctgccatgtaatacgacgattttgcatactcactatcactgaagacataccgtgacttcattagtgtacgtgacaacttatctcgaggatgaaatatgctaatccatcttccgtcacgaacaaatcgtagttcatgcttataaatgtgtggaatgcctaattcaacggcttcttccatagtaacctcactgggctgtgctatacatctgtgtcatgattttatacaaacttggtcccatcacatatttccattgagaaggtttaattaaagcaaatgcatcgatttcaggaaaattaattccattttcatctttatggtaagctgtacaacggcaatttctgaacatttctgggctcacagggagcgtatatccaaacagatgaatatccttattgctggcataatcatgtcgtccaaggtcatataaaaggtcttggtcaaacccagtaaaccctgtttcttcctggcattcacgaatagcagcttcttttggagtttcaccaggctcaacatgtcctttcggaatatcccatctagagcctctgccctggacatatgtatttgtcatacgacccatgaaaagccgtttgtcatcggtaaagaataagattcctgcactgagctctttcattggcattcattccaactttcttcaagaatatcttccatggcagtatagaccatagactctagtacaccatcacaattatatgaaccctctaccgagaaatcacagataggtccattaataccaagcagttcttctttgagtgaaatctcgataccgctcagtgattcattatcactgtaacacagaaggcgagtatcaccattttcaaattttacatgcactgcaatagccattatttcatctccttaatccaggataaagtttcactacgagagtcatctttagatttttctttctttactttgggcttatcgaatacacccctctgccgctgggaaacgaattgcaaccaccgggcaagtattgcaaaccaagttccaacacctgacatccagcctatgtaatataacgcatcgccaaatactggagaaaagaagtagaacccccagaatgttccaaatccaacaaaggctgataatgaaaaccaaataagcagaaataggaagaaatacccaggctcatcacatttaatcattccacggtaacaagtcttaatcatttgcggcagctcctaatccaggcgttaaaatcttcttgttctttccacttcttgtatttcattcggtaaactaaaaatgtacagcaattaatcaacgcgataatcagcatccacatgaggctgaatgcgaaaacacccaaaaataaaagcataatcataaattctgagacgttcaacccaaataatgtccctccaataattacgaaagcacaatataaaatccatgtcacgattccaaaagctggcgccaggccgtcttggttccaaaatccatcaggtttacattcattcattttcttctcacctctttaacaaactcaagcgactttttgcgattccattcaagggttaaatttttacattgctctttccattcagcctttcgttcataattatgcttaacatactttacccaacgaaatagctcaattaatcctagaccaagtaaacctattaatccccacgtaagtaatagtacattcactaatgatgtactgctaatttcagccaaattcattacgtcgattatgataagcgttatcatagttccagcagcacagactatccctggaatgaaaacatagtcagtttggtcaaatttatagacataattataaacgggaggttcacttggcagatataagttactcatttctgcaccctctcacggcagtatttgataaattcatcaatgattaattgtttgcctaccatgttgttagagtcaaacatactcataacctttggtggcaattcattaatgcagtaatttaagtaattgatgtaatcatctttagatgtcacatatttaactaggttaatgccaagacgatagctatttttattatgaataatctcaataactatggtgtacgttgttgaaccagaggtagaatatccatcggcattagcacgggctgatgttagatttgatggagaatcgttaaaagaataaattccgtaccgaagtgcaaagatatctacaagcttaactccatcggaaatagacgaaatgctagaaattaagtttttcagcttggaatagtctttaagaacgatagctcgaggcaaaactgtagtgttatacccgttatagcgagttttccaattctcaggccgagtatcaagacaagcaaatttctcaagaatatcagtgatttctgttgggaatcctgctgcaattaattctttaatttgaggtgttgccattggaatatctccagcgcattcatataacattttattatccaagttagggggcccgaaggccccggtaaaattacttcagactttccagatattcctggacatcagcagtggtggtttcaataccaggctgagtaccgctgaaggtttcaactttcatcatgatgtcttgtacatctactttagcgagttccgcgatttcaatcacgtcatcagcagaggtaatacccagagcagaagcattacgggtctcacggatgtattcgagtttcactgccaaatcaagacgctggtcatcaagcttaactacagtttcttcaatttgggcccgcatttctttatattcggcagctttatcacgtaaagccttagcagtacgacgatacagaagacccagtttagcatgggtttctacattcataccttctgccatcaagcgacgaatttcacgctctttggaagcacctgcctggtctttttcgtcagcaagtttcagcagacgcttttcttcatttactgatttaacatgcgtggtacgcagtttagtgatttcatcaataatacgatttgctgcagtggtgtactggtcttcaacagaagtgttctgtgcaacgaaggtaccgaatttagaacggatgaattcaacaagttttttcagaatagacattttatttcctttcaatagttatggtggtttattcgtacggattaatccaatcataaacatatggtttaatgattagaccctgttcatttttgctgcgctcgaatatctcgatgtaatcagtaacgtatgattctaatccgagaataagtacagactctttgccttcttctactgttgctttaattaaacgctcgatggctattttagcttcaagacgaatatcagcaagggtttttggaacttcatttgtatgcattaatgagttcctccattttgtccaaaactgcgatatcaacaagacgattaactgccgggtcatcggcaaactcgttgtaagttgaaatcaccaggttctcaatagttttcagagcagccattcgttcttcaccggatggaaaatttggagtttcaccaaacagcctagcaaaagatttaaaataagtttgcgctactaatctcaacttatcctgatacatatcaatttcctcagtaggtggggagttcattataactccccaaaattattagcagttaattaccgcttcaattcgtttaaccaaagcaggaacggttttagcaaacttgatagccatttgaaccgtagcagcttcttcatggtaaactcgaacgtagtactcttcaacagcaggccaatctttgcgaacgtgtttaatcaaatctttcagttcacgagtttctgctacgttgaacactgcattctcatgttcacctttaatccaaaccgcacgataacggtcaggagtaccgtattgattataaccacgttcaatttggataaagttgaatttagacattttattctccgttactctgttttgtttcgatgtagctatagtaacctagttgactactgatgtaaacaactttgtgcacaaattttcaaataattttagggaatctggaaggactttctagagagtagaatggatttatacagctggggatatagaaatgcccagacgacctctagaaggtatctgggctgtagttttgatattattgtatactaaaaagccccgtccgaagacagggctctgagaatcgacagcatcacctactggcagatgacctgcgaaattcattcctttggactcggaggcatcagtctcatccaaaggagtatagcgtcaggaggttatgcttgcgacagggaacaaccgactagcggcaatggacgaaccattctcttctatctgacgactcaacgagggcatacgcaagtttcccttcgaatttggtgccgattgcaggagtcgaacccgcgacatcttcattacaagtgaagcgctctaccagctgagctaaatcggcgtgatttaaatttggtacccctaccaggactcgaacccggactaccgaccttagaacgatcgtgtgctaatccattacactataagggcaattaatttttcaacaaacgtttcattataaacattcgcatagtgaatttcatgtattttccatcctgcgttagatattaaatcatgtctttctttgtaatagttatttaatacacctaatttaggatcagaataatgctgatttccattaacttcaattgctatcattttatcaggaatagcaatatctatagaaaaacctctatctttaattggttgatattcttctataaatgaaatacctaagtcaattaagatttctttaagatgctcgcatggctttgatttaaatttatcatttcttttccatgggtgtttttctggattttctaatatccatttcttgcgagcattagaaattttaatacattcttcttttggttttattcttcctttagaagctatactcagtttctgtttagtttcatccgatacagtaaaagtataacctaaatttttagcttttacatactgatttaagttaccgtttttaattcgggcagaattcattgctgccactgattcttttccgtaattctttcttttcggatttaattcacaccatctagagtgattagccatccagcctttaggtttatcagatatgtcaaattctttatgacaatgtttgcaaatactcattccaatctcctacaatataggagtatttataattggatagagcacaatttggtgcgtcgaacgagactcgaactcgtacgggtttaatcccgggagattttaagtctcctttgtctaccaattccaacatcgacgcaaatacttgttcaggcaggacttgaacctgcacgactgattccgtcagcgatttaccaccgtcgccagcatatgatgcaatatgcgagctcaaaaggtgtccgtcaccatgtctaccgatttcaacactgaacaatataattatattactgattatttatagcatttcttaaacgataaagctgattacagaattcgcgttcagtcaaaatcgtctcagaaattttatttttacccatactgtgagtgagcgtagcattccgggtagcagccaaagcttttctgaatccttcatttttactaagtgcatcgtatgctcctgtcagtaaattctgatacgcttctgaagcacgatggattggcacgcctttccaataaagcgtttgagttggccaccaccgtttctttttacctttgaacttagccgatttaccaactagtgtacatacatgtgcttgcatttcaggcgaagaaaatttgagggactgcaagaatccctccattgaggcacattctacgccatcatagataaatttatgaggagcaaagttgctcaaagcacatgatggatatgaactacctgaaccaatatccatttacttttccttcacgtatttcaaccaatcaacttttaacggactttctttttgtttatacgtaattccaacatggaatgcaaccggggcgtcaggaatacggatttcttctttaatatcgaagatttctactttctcaaatacccgcatgaaatcatagtcgtattcaatcggattacctagccaagcctgaatagcatacataacttcatttgaacaagaataatgattatctaaataagcatcaaactcttcgtctgagcaatcatatgcaggaacatcaacaccaaagaatttcttggaaaattcaggagttacatacttttgttcagtatgaagcttttcaagaattgcttcatggttgtaatcattatttccaaggtattcaccacgccgaccattagaagagaaccattcaagaacgtgaattacttgattaatctcttctttttctaagccataaaccatttgggtagaatatcggtcggcatcattttcccaagtggtaattgccattgctaagcctttaggaataacttgtccaaatttaatatgcatttcaatttcctcagttgataatttggtgaccctggcaaagactcgaacatgcaaccaatcccttatgaggggaacgctctaccaattgagctacagggcctttatagaaatcttacgacttttataaaagccctccgaagagggcgccttgtcgggcttatccacctgctaggcagaattactcacacataaaatcagctacttcccagaagtcatttttaactgctactttaaccaccggagaaatttcagatgttttaatagaaacaattacatcacctgcgacagtttctaccagaccaacgattttctcgctgcgagcaacaaatttactcaccggatgaaatttaccggtagcagcgaacatagcttcttggtcaacaatcagtgcgatacgtttcattctttttccttgtttgttttgatgtagtaataataacaggttattcttgtagcattaaatctcgaaaatcgttccgttttcccacattgttgcgaacataggagaaaccttaacgaatgatttgcttcgcattgcaacgtagtcgttatctactttagccaatcctgaagcaatatcagtaatacggccacacttcatagaaccgcgaccacctttattgtatgtgcgttctccgtagaaaacgatatcaccaacttgtacttctcgacctttagaatctttcatcatatttcgcctggcaaatttgtttaaaatctaatacaagttgctctacattagtatcagcggttaacggagtaacttgccgcagtttattaattttacacccagagtgataagcaataatttcttgaatatcacgttcactaaagtactcatatttaatcagtgaatcatatcggcatttaatccaaacccacatacctttgcgttcatcaaatgcatatgcaaagtcagcgttaatcattaaatcccgtttagcacaagatgaaagccctaatgctaaattaaccggtccatccaaagacagcttcaccgtaatagcatttacgtcatttgatacaccaataaaaatattcattctatttccttcgcttgttttttgccttcttgtcgtgcacgagaacgtcctgctttatgcagtgattcgtaatatgctcgacgtctatcaatgttttctgtacgatatgctttcccgaaatgggatgttttgaagccgtaatatttcataatataattctcaatggcaagtgattggacggtatgcccggtctcgaaccgagtcacattgactttgcagaatccatgtgtttaatatatcacccatactcgatagcatatctgaacgagactgcaatcccgctactcagcttacgccatcttgtattgtgtcataccgttaatttggtctccatagaatgactcgaacattcgacctttccatcccaaatggaacgctctaccaggctgagctatacggagtaatttggagcatccaaagggaatcgaacccttatcaagtgggtggaagccacctataatagccgttatacgatggatgcaaatttggcaggccctgaaggaatcgaaccctcatcactgggtttggagcccagcataatagccgttatactaagaacctgttatttggtgggagtaactggactcgaaccagtcaccgctcgattatcggtcgagagctctaccaaatgagctatactcccatggaaagctaatcatctaattgttgatgtaccactgctatgggcagcgtttaactttcataaatttggcggagagtaaaggagttgaaccctcaccgtttccgatggcccggatttcaagtccggtttgctaccactagcgctactctccaatgttggggtggccggcggaatttgaatccgcgactacgagaatcacaatctcgagttctaccaactgaactacggccacatcaatattcactccatccatcatgaggacttcatacgaaattaagagaagaatgatcagttcaacccctgtagacgcgttgaatgaatattaatttggctggactatctggattcgaaccagagataccggagtcaaaggccggtgacttaaccgcttgtctatagtccaattatttggaggcggaggcaggactcgaacctgcgcgtgtcgggatatgagcccaacattctaccaactgaagttaccccgcatttatccgggttcttgaagtactaacaagtagcttgatgtagaacacgctaaagatataatcttacgaatatagagcttattccgtgggaacaaacagcttcgtcctcggcattatcttacaggactcaaactcatcttcaagaactgccacgttcttatttggcggacctagcgaggatcgaactcgcgctctctcccgtgacaggggagtattttatccaactaaactataggtccataattcgctttcagagagatactctggcacgatgccgaagcaaaggggaacaggactctcatcaccttggtaccagatgaatcttgtttagcactctgttctaagatgtatccctgaaagcgaactttcaacgccgtaagaaattataacatgaacaagcattaagcaggatgaaatcatactccttaatacaaacgccatgccagggaattctgtgccgacgatttatcagaacgtcttctgacttctttatttggcgggccgtgcaggtatcgaacctgcctagtcatttctgacacggattaacagtccgtcgcttaccctctcagccaacgacccgaatttggtgggacaccgaagactcgaacttcggacacccggattaaaagtccggtgctctaaccaactgagctagtatccctaaatttggtggggagtaatggagtcgaaccactcgagccttttgagcaacagatttacagtctgtcccgctacccctacggtctaactccccaatgggtaattttatttatactgctctaaaattaatcagagcagttgatagattaataataacaaagaaaacctaaagcatattacacaatcggtgagctctttgatttaaccaggaataccctatgtggtgaatccatatgagagagcaatacccggtgctcaggaattggacttgtatggaaaggaaccacacgataacctttaggagtaaatcctagcaaaataccaacgcttgctgcagaaagtgacccaccacagtagtatgatactaaatcaccgggctggatttcattgtcaagagaatcggttttggtatgcttaggcgtaactaaatcactaggaattggaacgccttgtgcatcatagtattcatgtgcaagaagcttataattctcttgatagaaagtattaaatgcagctctgatattcatcacaatttcctcacaattaatctttgtatgcttcagttgaacctttagcaacggtttcaaatcgggaattcagtatctcaaaatagtcttgatacgttccctggagggcttcatagcattcttctactgtagagtagacacctctgatttggtcagagccaggagcaggataataattagaccaagttaaaagtgcatacattacttacgtttccagctgtagtgagccaaaataagaagcactgcaatagcaagtagtgatgaatgcagtgctgccagtagtgcacctagtcctacacccaaagtaacataatcatacttagttacttcttcacggtttaaatcatagtttttgatgaaccactgcttaatctttttcatgtgctattttatccattatgaaagaaatgatacccattagaaatgcaacacttaacactgatactgtttcaggaagagacataaaggctgcacctataatgccaaaacctaacgctcccatgcagatggttgatgcaacatttctaattaattcacaacgtttcattttattctcctcaagttgatagggttatagtatcactactacaacccgttgtaaacaactttgtgaaataaattcctatttcaaatcttctgaccagtccagttttagtggctcttggtactctctgtcaagcactaccggcacttgaacttcaccctcgaagtgagctggacctacattgtagctgagagtaatgtgcggtgagtaatctgggaaatcatgagttgctcccaaagctcttgcatattgatgacggaattttaagtattctgaatctagtttaagaactagtgtacgtccgtcttgcgtgtcccatacttcaagtttacctgatgtagcaacttcaaaacttcctgaagcacaaacgtatggaacatgaactcttgaatagcatatcgtcgtatgaatcttatgacgaggtacaggattagggaccttcaactcacgctgaaggtcctcaatagcatcaagagttttctcagagaatttagcagctacatatagaccagtgctaaaatcactgaagttcattaggcatcagcttcttcagtagtttcttctgcgaactgtgcttcgatttttgcaaccaggtcatcaagtttaacctgaccatcttcactgatttcaacgccggacacagcaatcagtttctgtagtacttcttcatactgtgcacgcagagcggacagaccttggatggtttcagacaggtcaaatacacgaactttcagagtatcgacttgggcttgcagttgttcagtagtcatttttgaattcctaatatagtgttgatttttgaataaagttcttctagagaaccgtcgttagttattacgatatcgccttcgcgaatcggaagtccacgctctgtgacgtgagtatcttttttagaaccttcttgcacaggacgaactacatgaataactgtagcacccatcgccctggctacatcaagttcatggtcttggcgggtatctgggacaatgaaataatcataatcaccaaaagtatcagccataaccaaagtgaatcgttttacccaatacatgcgatcgagcttatcacagacaatgtcagtcccaagggtctgcatgagacgacgaattgaccatggctcaacaggtttatttattacaacttgacggatgacttccatcgtatcgccgtcaagaattttacgcttgctatcataaaccaccccaggtaaaggcaaatcatgatggacatattcaatggcattcgccataatacgaatcacgtctttagtagacagatttaaatcctgctcacgatcgtaatcaataccttcaatcattgaccgagtaatgcgaggaaactgacgtgatgtatcgcgataccactcagtaagcattgcatcagccaacgcatctttaattggacctgctaactgatgctttgttgcgttataattatccataatgtagtcagcagttgtatctttgccactacgttttttaccaatcaaaaataaaagcttcaaattattacctcatagaaggatgcattcccataactttctgttgatactgggattcgcgagtatcattgacagaaggtctaccagtaattattataccatctttttcaacttcaatgtatttgtactgcaaagttgctacacataccattgctgggtcggattcttcggttaaagaatactcaatttcagataaatcactcacccaacctccgatgtagcggacagttaatactatatcatgtttatcgttatcaagaacatgcattaaaactgcaccaggaaatccttcaccgccgttattccatccagacttgtctcggtcaatgtagttttgacagcttaacatccatttgtacatttgtacccatgaatcaagattttcatctactaaaaatctaacaggaacagcgtcaaactcaaaagtagacccaggcaatttagcacgatgcatgccttgaggcgaacctacagtatcagtagcaggaatatgaattccaggaactacagctgtttgaagattagctttaaacgcttgggtgaggcccccatcagggacctctaatataaagttagttgtgttagtttgattaaacagtccagtagacattatgatttccatacagaagtagcagagtagcgtttgcctttcgacatgaactgctgcagtggtaacatgactacattcgcccaatcagccggttttatctcaattaaagcaccctttatattaccaggaatatatgctttaatcattttgtcagcgccagcaaatcctttaacttggctccagtttatctttaatctggtcttattagatatcactggcgtattagcatactgtttaagaagttcttctaaaaactgctgacgagcctttggcggaatgtagtgaaggtttaacccatacatcaatgtggttgtaccttgctttccaagaccaagataaactatcaaaggaaatttatcccagaatggaagagtgtctttgtgcttagcgtcatacatgtaagcatatagctttccaggttgaggcttggttacagaatgaccacgtatatttttctttatagtttctgcaaaccatttagcagatttattgtttactgctgcgccttcattacgaattttatctttgatagagcttcgaaatgaatttaccatcacaagagcacgctcttgtttggtcattttgttagcaggttttttctcaatttctgctactttaattgccgttttaattcttgatgcatgacgagccattgctttactgaacgtagcaggatttattcctttgctttcagcgaatgatttagacgtcatgccttttttacgagcagcagagtattcaactcctaatgctacccattgattttcactacgggatttagctttaggcgattctgcagcttcagtgataaattcaaatatagccatcagcctttccatcctaattttttaagtgaatcttcggtaattaacctaaattctatacccattttactggcagtagcttgagctgctttccacttatcaacgtttacagaccaagtgtaaatttcatcaatgtaccgtttcttcgctgatgtcgtcaacttagtgggtttgaccggaggtctagtttctttcttcggcttaacttcaaaaaagaactgttgaccattagaaaacttagcccagaaatccatgaaataccggcgtttctttccatctgcattactaaagtatggaatgactacttcttcgctattccattggactacatctggatgattgtcaagccaacgcatcatgtactgttcccatgtagaacgataagtaatctttctaaagtcgcctttatatttgtggagattctgtggcatgaatttgccagaatatgccatagtggcctccttataaatactgttattaatatttataagaggataaact

SEQ ID NO: 41 - DNA, 175617 bp, unidentified
  source 1..175617: mol_type = genomic DNA
ttagtaatggctaaaaccatatgtaacatcaatcatgactttataacggcatacacgcatttttgcgttattgtaatccactgggatcgctaccacgtcagcaggatccacctttacctgaatgactctaccaacaccgcccccgtagtgtggaaggtatgatttagccgcaacgtgtaggccagtagaacaggtgcgcgttttatcttcgtctaccatgtttcgaggcatggagacagtcacaccaggactattatcaaatttgccagtagcgagatctttatagttatcgcgtacacgtttccaggcaagaaaacaaccatcatcggtcagttcaatgtcattatgtacaaggaacccgtaaagctggtataccgcatcgcgtgaagggtttcgcatcaaccgttcaaagaagtttaccaggtgttcatacggacgatcgttatacatttcgcgaatgattcgttgagtgatatcagaatcaaacactacatctttatatagaagctgatgaccaatgattttaatgttacctttgctataggttcggatcgcttcctgggtatccaaacaagttacagcacctttgacatcaccagctttcagcatttcatgcgctttcttaaagttcggatgtgtttcacccgccatgaaaacgcgtccttcgtatacaaccgtaatgaacgattcagatccgatcatacgcggtacagtgtctgatactttaggcttttgttttacatcccttttcttagggaattccgctaacttgcggttgataacgcgcccaatggttcgggcgcttacgttgaactgttgggccagtgctgttttacttgcccccgtcaaccatccattatagatagctttctgttgtacttcgtcgagaattttgaccattatttccaccgtattaatttcttaaactcactgagattcttttcgttgttgtaaatcggacgaattgaataagaatcgctatgttcaacaagtgaagccagtaacgggtttagtgatttaaagatttcccatgcctgatcaacacgttttttcatattgctgcgtttaacgcgcattgatgctacggattcacgcagaatcggacaacgcaccctggaaagatttttaccatctttctcatacccttccagacacactatacgttcgagggtatcaacaaccttatacagtttttcattgtatcggtttttcacaatccgatcaagagatacaccgaaacggctatgcaatgcgtctgtttctgttgagtgatccttcccaatccatccaggcaagcagttatctttcaatgccttttcggatttaacatactgcttgcacagcatatcatcaaagcataccagatttgaatccgggatccacttccagaggctgttacggatagcaaacacaacagggatcccagtatggcgcatgatacgcgataaagtagattctttcattgctgaatccatagacaacctggaattttcaccatctaagcggctatattcatcaataccatacaaccgaacacctggggctttatccagtgataaaaactctgattttgtcataaacagagaagtttttgccagattgccgttactatccaactcataacgatatacggtcggggtttttgggcgcggttctgaatttttcggtgcatatagcgcttttgatttttcgcgatctgcatcatagatctctttttcttttgtcatttcactggtacggagatacacaatttccgattcatcaaaatgacctttccgaacgatatcattaacaatctcacgctttgaatcactatcgtaatatgcaacaaagctaacacggcttaggttatgcattttagcatacccgacgatatacggtttaaccgtgttggtatccacttttaacagaatgagtttcttctgtttccacggataataaatgcgtgtgatgtcctggcgtttggttgtttctggcttatacttgctccagcggcctccgctacccgttacctgataccatgcatctttaccgtcgtattcgttcgcccaatacccagcaatataatcatcattatatttgttgggtttgactagttcgctatggatccagccaatagaatcaccgttgatgcgaaaattagcatctttaccaacaaagttttgtaccattgaaggcagagaatggaaccacgtcagtttatcacgaacggtttgtaacttatcgaattctgatttaactcgattgaaatacacccggctgatttgtttcagacgttctttaataatccctactgtcattttatccatactcaactcttcgcgagaaggcatgaaatcaagttcaccgatcgggaagtcaataatatacgtatactggctttctgtatagcaatagaacatcgaggtatcatacaaatctttatccagaggataaatgatgttacccatgcgagcatatacaccgctagtgtatgctgatttatgacggatcaccccgctatcgttggttgcttctttcggctgatagttgattttgagaatagaagcaccaacaaagttaggacgaatatcagtaaatgattcgtatacccttgctgcttcgttttcccattctttgatatcttcaactttaaccggaacagtgatagtaaccccgttaggttcatcactttcaatctcatacagaggatcgcagaacggttccccatcatccatatagattgtgtaaccgcatttgataccgtcttttacagattcaactgtgaacgcatcggcatagcaaagcggagatttgcaacccagacccatagaaccgatcaggtcgtttgaatcatttttagttgattcgaagtaaacggtaaacgcatcactaacgaaatccggagacataccgatcccgtagtcacgaataacaaaacgaggatcaacagcagttggcaactggacatcaaacgggttctgatttcccgcttctttgtgtccatcgatcgcattacaagacagttcgcgaatgattgcacggatcttgtatttgtatacggttgaagaaaggatcttatacgctttcttgtttgcgcgtagagatagtttgtttcgtcccttgctggtatctgtaccaactcggtagattgtttgcggtgtatcttcgcgtaatttcattgtttatttctcacttaacattaaaaataacttggtcacaagagtacttcgttggttttttgttcaggccatattctactacttcgcaataagtgtcaaggaattttaccaatttttcttcctcgacctgctgtttcttcatatcaaggataccccacacgatagccccgataatgatagaaaagaacgcacaaaatccgaatatggtcagatattttcccaatctaggcgcattataacgtgtcataccttacccctctttgcgaatgtatgcaagttcttcatgggttactggacggatatacagacggccttttgtatatgccttgcgcccactgatccaaatgtttttcatatccttaacaccgttcatcacatcgttgtaaaacttcttatcagctttagcctgatagacttcacggccttgataatctttcatgaacaaacaataaaggatctcattcttatcaactagattagcatcctttgtagttgttttacttggtgaaggtttagcacccaggcgcaaggccatagcttgccacactttaccatgttcataaccgcgcccgacaagagcatgagcgatttcgtgtaaaagagtgtctaaaatatcctcgtagatatcttccgcaacatgacgaccagatagttcgatcagttttttggtataactgcaacggcccagagtttttgtaatgcgtccattgatccggaatgtccaaccattactgatcaaaccgtgtttttccatcatggtacgcgcccagtgggttacttccattgcactacgagttttcaacattttagaatctcctttgcttggtacaaaaccaatatagcaaaaagccccctgcattgcaagaggctttgtaattatttcaacttcttagaaagttcttttaaatcattgagatactcaattttaggggttgtttcttcccagtatttcaactgtttacgcaattcttcggcttcgtcttccagctttttgctttcgtccgtggttagatggtagatgttcatagccactaacatttcggcatgattctcgcaacctatccacgtagacacaaatttaaccgcttcgctgcgactaaggccacgcagagaatcaggagattctaccatttgagcaataaacgcaacctttgccagtgctttatctaacgcttccttagtttcctggatacgcttattgatacgctgttgatatacattcatacgaatatcaacgaaatcctttagaagcgtttcagggcgttcatatgagtataatttaccctcaaagataacgttaatgtttgggtttgagttttcaatcaacccgaaatctttcaggatcttttcgcgggttaacccgttggcatactctcgcttgagcgttacttcataacgaaaatcttctttcgatagatccttgtagctaacgataacgcctttttcttccagcttgtcaaggattgcaatgtatttcacacggtcatatttcactgggatctcggtgatcaccaatttggttttaccttgcaattcatacgtgccgtaaattgtaccgtctgtgatttcacctttaaagtaagggtatttcagatccagtgtgaaatctttatcattcagatatgcaatgcacccgttaacaaccgatttaggatcatgaggcggaatgtttgttgcatatgcttttgcaatcccgctaaacccgttaaccagtaccatcggaatgatcgggagatagtaagctggcggcacatgttccggatcttcatgaactggcgttaaatcaccatccatataaattgctttgaatattggcgatagtttgcacttgatgtaacgaggtgcgccaggtttcttaaccaaacgggaaccaaagaacccatcacggtcgaataacggaatgttattgcaccagtgcgccgccataagggataacgcttcttctacagaggtttccccgtggtgatacccatacatagcaacaccgccagcgatagaagctactttctgaaatcccgttccgccctgcatagcagagtgaataaagaaacggtgaacgggtttaaacccgtctaccaggtgcgggatcgcacgtgaataaatcgtgtaaagggcaaacgttagtccttccacctgtacaacatctttaatacttctttccattagtcaaccttagaaaatttgtgttttccattaacccaatctttacgcggatcagattcgtcgccgaagcatagttctaacacttctttgtattcgtcgtcaagtacaatgacatcatacttcaactgatcacccagaacacggtcgtaatcttctttgcgtaaagaacccagccccttgatatatcgtacatcttttgctttatcgcggaacggtgcaaactcatcaagagaatagaaccatttttcctcgcgcccaactttagcgataacgatcggggttcgaatatatcggatccgtttctcagtgaacaaagaaggccaacggctaaagaatgcaagcaacagagttaaaatgtcaccaccgtcaacgtcagcatcgaccatgatgccgatattatcataagtcattccggaagtatcaccaggatgaatattgaggatagccattagctcaaacagttctttgtttttgataatgtctgtaaaactcataccccatgtattcagaggcttaccacgtagcgggaaagcgccttgtgtttcttcattacggcattcgatgaactgaccaacagcggaatcgccttctgtcagaaacaatgttgtttctaccccaggggtatcaataccggaagccggaacgtgtttagcaatttttgcctttttcgctttctttttcgctttggtgatcgcggcggcttctgctgcttgtttacgaatcaatgcggattcaatgatcggagtaatgatttctggggtatccataatcatttttgcgatctttttgtagttcaaattcgcatgattgttaaactcacctgctgtatttgctaatcgctcttttgtttggctatcgaatgcaggtgcattaaagttatgcaggaataccacaagagttaagcattcttttacacgtgctttcgggatctcgatactatgctttttcttgatcatcggttcaagttcagaatagataccatcaatcatacactcaacatgaacaccgccgtttttcgtatccagaccgttaacaaaggatttctgtttaaacccgtcctcagtgctcgccagaatgaagctgaggcgattatttgtctggacaatggttttatccccatacatggaagcgtacagcgggaagcgattagagagcgtttcgccgttatatgtgaatttcacagacgggaaagcaacagcaagggccattaagcgatccttaatcacttctttggtttcttcatcgataccagttacaccaaacatagagaagtctggagtaaacttaacagtagtaccctgttctttactggggctggttctgtaatcgatgttctgtgcgccgtccgtacagttaatggttactttgcgtttcccgtttgcagtctcgccaataaaaatcgagctataacagtttgtcaggaaagaaccaacaccattcatacccatcgttacgcggtttttatcatcgaagttagaacccgattttgccatagtccatgccgcaactggtttaggaactattttcccatctggggtttttacatcatcctggggaataccgcgcccgttatcagagattttaaccagattatgatcaatggttacatcaatcttattagcatgtttgaattcagttcggatcgcttcatcaatcgagttatcaaggatttcgttgattattttaaccaacccttccacgtactcaaccttgcgatattggcccattatgaaacgttcatgcgcttctttgttaaccgacccgacgtacatatttggacgcaaccgaatatgatcgcgatcgctcatacaaaatgattcgtcaacctttgcgccctttttggctggttgtggtttctgttctggttcatcatctgccagaagaaaatctaaactcatattcacctctttgtttaatcaccgacattatatagggttctatgaaaaagaaaacccctttcggggtttacttgttgtaagggaaaccatcccgaaccatttgcggtttgtccaccgttcgttttgcttcgcccccgcaatcacactctttcggttcgtcgcggcttgtgatgcttgccatttttggaaattctttattacacttggtgcatttataggtataggtaggcattaataaatctcttttaaacttaacatcttaactaaacgggctttgtctatgtcaaaaacacattgacgtgcgcccggatacaacttttcaacttcgtataccatgcagacgaaaccaacattgtgcatgtactcgcgttcatatgcattgaaccaacgagaaaggcgctgtattgactgaaaaccaaagtataacccagccgcttgaaagtctatgttatctttttcaaggttgcgcatcaatcgattatcgtcatccggcgctggatgtcggttatcatccatatcaatatagatatcaggattcatacagaattgatccaaccattcagcagtatccattgacacataacgattgacatatgggccgctttttgtttgccatttttctgtacaatcattccagaaagaacaagaaaattccacacgatatacgaacatgatataatcctcacaagtaaactcaaggtttacaagtacgataccacttatctaatttttctgcaagcatttcgttgataatttttgcaatttcgtaccgtccgtgagtagtacccagttccaggtaaatcacatcaagtgcgcacacaatcgcatcaatactttcttcaacgatattaccgccgcgttgaggctgaatgagacattcgctgatctcgccaacttccgctgataggtgatgaaccacatcactcttcgtgcgtttcttcactttatgagcgatttcaaaaaacttatcaagtacgatcgccgtttcttctcgcgttgcagtattctcggatgtcgtctccgtttgttgaacaacgtattttgtaaaatagttttcaaacacgttgaaagggatcacatgaggaacaccattcaaaaacaccccttctttacaaacataatggattttgcgcggaatagacaaaccgccgctgcattccaaatgtcgtttaatgcttgctacaaaatcgaaatctttcccgtatccagccaacatactgtgatacgtgagtaggccaaatgcagaaacatagagatcattttctttatacagattcatttacaatacctttatggtagccaaaaatataacaatcaattgaaggacgttcaccagggaagtgaatgcattgcatgatgcgttcagccattagatcttctcccatgtataccgaagtagtttcttcgttgtaatgggtatcatacgacgttttaagcgtcatgcccggaagccctgcaatgtgcatgaatttagaattggtgcaaggttttcctacttcaccgttaatcatcaacactgcattagttttacgtgcttttctcatttgaatttcaccccgatttgcgatacgttccattcttttacttcatcaacaatatcataatggttgatgtatggtaaagcaatttttaaattactcgcgtcttgaatgttgcgtaagaaacgagtaggagaaagaagacacaaccgctcggatccgttgtttcctttagcggcaaatgatagggtttctcccccgtcaatcttcatatcaacagaaatcgttttgaattctggtgcgtatgacgtgattttgccgttgtctctcggcgtactatagaaacatacactttgtgggacattataacgatctgtttcaatgtacatgtaatcgccgtcagtcattccccacgcggtataaagggatccggtatagtcaccaaaggaatttttaaaatcttccttcgtggtatatcccagcgagcgcaattgcataagctggttatgctgttcgattgcgtcggctttttgttgttcctgtacttgcgcatcaatcgtttcttgccaggaattatacgcatagtaacccacaacagcgattacagccataacccctacagctttccagattttagcgtcttcgtttttgttactcatgctatattccttttaagaaaaagggccgaagcccctttgttaacgaagataaaccacataaccgctttggtcaatcgcgcggtctgcgtcattgaagatattaccacgaatgccttttgctggtgctttccagcttgcaggtttcaggatattaccatcattatcgatgaaagcggcaacagaacgctgattgaacatttcaccagtttctttgttgcgagtatcctgaacaacgcgatgatatttgcggcctttctccagaaagaaaacagtttcgaaaggagaatcttggaaacgagcgttacgcgctttgtacattgcttccatgaaaggggctgctttttctgcgaggatttcgaaagtgttcatggtatatctcctaaagtgtgtttcgtttcgatgtaagtactatatcaaagatggttattctatgcaaggcttttttcgttatccatcaaatattttaagtgttcttttaatgcagggagttcgttcaaatggcgttgcttaactttctcgtactctttgcgttcccagttttcaagattgcttgccagcgcttcatcacaataagcgatcccgcgttctgcatcctgaactttctgtttccactgtgcaactgcttgttgataaagagaaccgttaaccatcataataatttcctcccttgtttcgatggggtaactataccaaagctaccccagaatgttttaacaaaaagtgctattagtaggtatccagtttatacattttgcaccagttcatgaattcttcgaaagtctgagtattaacacgtttttccttcttcactttcttagtgattacaggacggttagtaaaacgtttttgcattttcacagtgattgctactttatcgcccaagtcttctaccttttcaaccagcgcccactgagaaccaatttcagcaccgaaagttaaaccaacaatctcacctgctttaacgtgtgctgcatattttactttaaccattttcgtattcctttctctgtttcgtttcgatgaatacaagataccaaaaagcctcccgcattgcaagaggcttctttaacaaaaagtgctattttatttctttgagcaatttacggatcccgccgccctgtgtcttatcaaagattttctttgcatcaataacagaagtgattatgtggtagttgttcccttttccgtcaaactcaaactcgaccttgtagtcactacgaaatttcacaaaaacaaattcacctgcaaagtgcttacggaactgtttttcgttaatgtccaaccattcctgtgtatcatctaactgatacatgcgacaaaacaggatcgaacccattacagcaatcacgacaaggatagctaacgcgaattctgacatcatttacccctgtttactgattgacggtgcaatgatttaggcacaaccggatttcggtatggtttgactttatggatcgttggttcttccccaaccaaattaggaaattggctgttccattccatcgaaaatggatagggtgatgactttaactcttcgatcatacagtttactaaacggtcgccgattacacccaaagccgccccaataatcgctatacgcataaatcaccccttaattgtgtcaagtacagtaaaccagtcatgaagccatatcgttgttcttacagcgatatacgttaacaaactaatcaatgataccgctccgcaaatagccagcgtaatcaacacccggatttcaaatttagtaaaattcatatcaatctcctttctgagaacccaatataacaaaagccctcaaccgaagtcaagggctttgttttaaatttttactagttttggcaatcgaagaactataccaggatggatcagacgtgcatccggaatagaatcacggttgattttagcgatatcaggccaaagttcaccaacaccatacagtttctttgctatagaatataggctatcgcctggttgcacgacatagcgatcagattcaatcttaaccagatcctggttaatgatatcatcaaaggcttttgctttcgcttcgttaatcgtgttcccgtagtaatggcgatccataatagttaatgtgatcatcgtttctttcctatgctgttttcgtctgtctcttctaaggatggaggttcttccagccccagggcataacgtttagcatagattagcatcaatgcatctttagcgcaatcatgaatcgaatcatgctgaatgaatccatctaacatgcctttacgcagtggacacgtggtcactccgcgagttagtaaacggttttcaatagctgtacgcacatcacggctattccagaacacggtcggcatatcttcgaacgtgtcaagtttccctgtcatagttcgtacaacatcggttagcatagaacgatcgaattcagggccgcgcgtataatcgtatgactgccaacgactcacaccgtcagccgctaaatcagcaaagaattgtcgatgaccttcgtacaaatccatgtcgatatcggaagggaacaaaaccctttgcgcttctttagattgctgtttccaccattcgatcgttttttcatctttgatgcgttctggttgtttccggatgtcaaatttgtactttcttcctttagcaatcagttcctgaaaggtaggcggatcataaggatcatcaacaaacggaacatagctaagttcagctagttttccttttggaaacgggccaatactttcataatcaaatacgaaatctacgggtaaatgactcattcgcgaccccgcttatacgattccatgaaataggccaatgatagcgcgacttccggagtaacatcaacggattcgatcatgcctggagttactgccatcatcccgaactgacgaagcccacaacgagcaatcgatttttccagtcggatcatgttttctacagcctctgtaaaattgtccagatgttcccaatcgtggtaatcttccattgtagaacgatcacttttcaaaatcagatcggcaaccaattcagcataaaggcgcggaaggtgaatattcatttaaaatccctcaagcatgtttttgttttcacgaatgttacgacccattttcaaagtatcaatgatcactgcatactcttcaaaagtgaattcgatatcttgtgaaatgtttccccacgtgtaggtcggcccgttaggacagtataacccaacttctttgtttgcgttgacaacgcagcgcaattttgcaaacaacaaattgatatcgatagaattgaacccttcgagataatcaagcccctctctaccaatacggtcaacttctcgcaaaatcttttctacatctttgactttaacaataattttcataataacctcaaagggccgaagcccttagacataatcaacagtgaatcgtgcgcgggtagttcctacataaagcaactgcttacacaattcataatcggcgtatgcgtatgcatcgcgcgtatacatgtatgaatgatcatacgtgcttccctgacctttgtgatacgtacaaaccggaagcgccttaaccgtctggaacttgtttttgatttgccagaacgaataccagggggctttgtatccggtttcctgtttcatcttcttatactgaaacgcgacgtagttcaaataatcgcctaaacgttcctgcataaccggatccgcgataacctgaatatccgctttcgtatcctcgaacatcgattctgttttcatcaagaaataatcgatttgcaccggatcgcatcggtcagctttgatagtatcagagcgcggtatgatttcaagaattttaatttgctcgttgttgttatagataacttcaacaaacgaaaccccattcacacggccttctgtcactaacggttcttgcatcacaaccacttcaccaacaatgaacggctgatcagttttgtacaagtgtttacggatcactgcgtttaacttgtctacgtttgcgttagtgtaagcaaacatacggttattgttcaggtcatccggagtcttaacacggctaaaataacgtctcaggaagtcaccagcgttttcgtgcttcattacccctagttcaccattcatgaggggcattaacggcttaccgtcgcgtatagcgcgtgatacctggatgattgggtttccttctgcctgacgcataatcttatccatgcgaatgacatcaaaaatttcctcatcaaagaacggtgaaagctcggtgatcccttcggtattaacaggacggatctgatccttatcacccaatcccaggatcaccgcacaactcggaatagtacgcttgatgatacggaatagttctttgtcaaccatcgatacttcttcaaccacaaacacacgacattcagacagatcagcggcttttttgcctttttgctgttcaaatactcgtaactcttcgttggttacggggctgattttcagtgctgagtgaatggtcgttgcatccatacccaccgcctcagagagaacgtttttagcctggtgcgtcggtgctgtcaaccagatcccactaatacccagttttttcaatgtttcaaacacaaattttaccagagtagttttaccaacacccggcccacctgtgatagtagtatggattttgtttctgatatttttaatcactcgatcatgcgcatttttctggtcttcgctcagatcgtcaaaagttaattcgctcatactttaatcaataccccttgaatacttgcgtgttcaataaaccaacgcatatctttctttttcttttcggttacggtttcaacttcttcctttcgaaagaatcggctaagaccactttgtttaactggattcatcttatcatgatattctttgataatcgaatttttatactcgttagcatcgtccggagatagaaacaacaaaggtgttaactctccttccttaatgaagggaattttaaacccgtctttatccttactaacgacgatataatattttgtaatcattctcgcccctcataacaaacgtagaatattccaacaaaccaaaacactgatagtataatcagtaaaagttttctttcaacgccatttacgtgaaacacacaccaaccgaaaagatatgtgatcatcgcgcaaacaccataagaaagaaccccaacagctactagcgcgatgatcggatccattagtagttgttagcccaacggcggaggttttcggcttgtttcagtgcatacagtttgtagatggtttccgcatccatacccagcgccaggaatttgcacataaagaaatgccactgatcgataagttcaaacagaacttctaaacgatcctcttcactcagatccgcaaatttagtattgcgcaattcctggtgatttgctttccacggtttccaaacaccggaagcaggtttaacaccgcgagacattccacccagagcggtatacaattcgcgggtttcatcggcgatcgcgtcgtcttgcagtttcagccaatcaaggatttctccacaagtttccagattatccggacgcggaacccaatgcagggtatcagacaggctttgttgtgcatggttttgtaaatccagcatggattgtaaaggatcgccattacgggccagaaccttttgatattcggaatctacaaattccagatcttccgggttaaccaggtgcgcacatgaattaaatacaggagttttatcagtagtcatatcaatctcatttttttcggtgatttgtcccacgacttaaatcgaagttttgccgtgagtccagaaacagtattatctttcaaatactgcataatttcaagtttagttgcgccgtccgtttttatcatttcgttgatatctttggaaggccacgggcatttatcccacattacaaccttttctccagcctcaatcaatttaaagaggcggtgagtagtatccggatgacgtgcttcattgtcaagaacccagacacgcatatttttatacggaacctcagaaagtgcaagctgtccaccagtgatagcgccagcattatcaacaaacaggctatctaatggcccctcaagaagataaaccgtttttagcggatctatcgtatcctgtccgtaaatcttggttgattcttcacaggctttgattgtgatatatttcgactttgccccgtcgcgtaaagcacgaccctggaaagattcaattttccctttcttatcgaagatagggatcactaatctcggttctggttttgcgatcggataggtatccggattcaccgtattaaccagttgttgccattcgcgagtaaaccacaaccgatcccacttgtcacggggaatacaacgattctgcacatattttatgatcggatgttcatccggcaaggtatctaacctttcgcagaattgaagagtaggaataaatttcttctcttccttcggttgttctgtatgcgttggctttaacgaattgcgatccttaaacgattccatgagataatcacggtaatcgtctggataatattctttcaggaatacgctaaacggtacaccataaccacagttaaaacaaccacaattcatatgatcaccctttttagaagggtagatccaaaatcgttttttgtacttgtctttcattgagtcgccgcaaataggacaacgcgcattgatgcttaatgcccccgatttacgaacgatttcgctttgaggcagtgatcccatgattcgggttgcaaattctatatcaagatacatttcttacctcagttgactatctttagatcctcgtcgattataccccgcgctgatcatttcgtcatgttctttttggcattcaatacaataacggcaacccttcacgatagccctacgtttttcgggtatcggatccccacaatcaaaacaatgcgttaatgattctccgtttctgatttgagaacgtgcaaaatctatcgcattgtctattgttgcctgaatggtatcttgaacaccgtcagcagggccaaatccaaccgccattgtaaatcctcctaatcaaatgatttcaatatcatagactaagaggatttttctgtcaagaacttacttgcttttctgttccgtcaagcattaacttccaaccacgaaacgcctgtttaaacgaataatttattgcaatatcaattttatcagaaccttttcgacgattctgataaacggtcgcgttgtcactcatatacatgatacaaattggaaaccatgtataatcgttagcagtagcccagatagtgatattcagcggaggaattatcatttctttttccttttccctgcacgggtaacgcctaatactttcggcccgatgttggttactgctccagtagtcacaccagaagcaatcttttctgtatcgccgccagaatcacccgcgaccatatcctctaacatgcgccccttatcataatattctttgaggcgtggaacgttcaacatgatttcttcatgctcttgttctgtcagattgtagcgattgcgtagggtatcatatgaactggttaagttcataaacccactcatatacggaacagcattcattctacgcttgatatggcgtactgaacgatgaaaaggagaatacgcttctaactcttcttttgttttggggttgcgaattacttcgccttgtccatcaaggatccccagcttgtaagcagtccattcagtccagggctttttgagtagccggatcatccggacgctatatgttaaatccatatttttaactaattgatcactcatgattattactctattgtgaaagtgaataaatcagatttggtttcaggttcaaactccatacaaacaacctcgcatagtggtttaacccctttccaatcctccaggtaatacccagtatctataccgcatccaggattcataacgaggccagtttcatcaagaaactttttgcatttacttgatgtggtgctgtcatcttgtcggaaacagtgtgttttcgaataccggaaatttgcagacatttgagggattatgaaagttccctgacgtgcgatctgtgatgcacgttcgattactttatactcaaattccgcccctgtatacttacccttaaaatcagaggttttgattttaccaaaaggcgggttactgatcgccatatcaaacacctgattaaattcagttgttaaggcgtctccatgcacccaggaggcttctggtacgatacgcttacctaactcatagtatgtgtgatttaactcaacacagacgatttcacgcggcgtattgtacatcatgtaatgaaccatagcgaaagataacccaccgataccagcacacaggtcaataacacttccacctgtgcaagcatcgattgtgaaatcgcgagcaagtccaataggggtaaagaacgcccctaattcagaattgtttgtaaacgcgccttcatgaaagttttcaataatgaacaacttctcttcgtaagttagcgctttgtcagagtgaaccagatccattatctgattgtgtttcttggtttccgctttcgttaactttgccattttcccagctatacaataatgttgattcgttagggtagaattcccatccgtctacatatccggtttcccaatcagtagtttgttcaaaaccacagatccattcatatacaccaggaggcatttcgacggaatcaggaagcccgatatcttccgcgctgcgtccacattcaaagaatgcatcatgaatgaatggtcgagataataccgtaacataaccttcatcgtcaacagctacgatccagcgggaactatgaggactatcgaacttcggttcttcttcgtctgcgtcagcttttatttcagccttacaaaaatctaaattcatcatttcaaaccctctttaacaccctctttcatagctttccaggtagaacctgcttcaccattcagggcggcaaatacaaataataagatagcaaggacaagattcacgccagcaatcaccatgattttgctatacacgaaaatgtaaggcattgccaccacccaccaactaaaagaattaccagttacgatgttgagtgctgcaagtaagaaagtgataacgaatgcgattttcataatgtcctcctttgttatgattaaggtatcatcttttttgaaagaatgcaatacctatagatacaaaaaagccccgaaaggggcttaattttttatgcgttattgatgagataccgaagaacgtttttcgcttgttcctcattacaaccaactttgaaaccaggttcgatagggaggaagttccagaggaaatcaacacttccttcaacgtcatctttgcctttttccagcatcgctaacagcaaacctttgtttttgatgctgtttacgattgcgtcaaaataaccatcgctgaaatcaacattcgggttcagcatttcgttgtaagggttgttgaatacgttcattttgaatctcctttgtttaactcagtatcttgtctacgtgagttatattaccacaatggagattcaggtcaatacctttttacgattttttgaaaagtttttcgtatttggcttttacccagcgatacatatcttcggccttgtcactggcaagcagtgagaacagcagatagatcgcagcacccaccaacacaacgcctactacaatgtagacgggtaagagaactgggaagagaacccagaaccatgacatttgcgagaagccaaacactttagcggctgcaaaaatcagagttagtccagtcagcagtttgatagccggaataggaatcgttatagtcttagtcatttcattaccttacattctttatggggctattcgccccagtcaattaaaattgaatgtcagattttgcaatctgtgccattttttcacgtcgggtagattcagcctgtttaatcatcgggccttgtgtctgttctactgttttaggcatagtgttgccgtggtagtcagatttaaacccgtattcgctgttgtcggtatccatccagcgctgattaccctttcgaacttccaacttgaacttgttgaaagtgttcttatcgccataacgggatttgatttgcttgaacagttgcataccctgatcagctaactcttccgtctcgattacagctaacataaaatcagccgtagcaggtaaaccagcggattccgcaacatcacccatactcacatccgaactatcccatgcagaacgcccaacctgtgcgcctgtccacatcacggtattagtttcaacagcaagaccgcgtagttcttcggcaattgctttaaccagaatataggtattctcagcacctttaacacgggttgaagtacagatccccaggtaatcgacaatgatcacatccggaacaaactgtttcttcaatttaagctctttcacaagcgctctaaagtggtttgcacctgcacccgatgtagggtactgcttgaccaccaaacgcccaaccttacccgctttaaggcgctccattttgttcttatagtctgcgtatgtaatgttaccttcgtcgatgtcatccatagtcacatcaagaaggttagcatcgatacgcttagagcaaacatgctctgccatttccatagaaatgtaaagaacgtttttaccctgttgcagataatcagccgcaagagaacataaacccagtgatttaccaacgttaacaccagccatgatgatattcagtgtaccacgttccgcgccgcctttggtgattgcgttcaggatcgggataccaaacggaattttcatcgccttcgattggtaaagcatccaccgtttttcataatcttcgaaatagtcatgacctactgaactatcgaatgaaattgctaatgcttcctccatgatttcagggatagccccaacaccaggaagtttcttgttctgttctgccagtggtttttctgcgttagcctggatctcgattgcgcgagaaagagcacgatacattgctttgtctttgcaatatgtttccgtttccttcattagccaatctaaatcttctggcgcatttttcagcgactgaatcgcctttttcgtgtcttcgtagactacatcacttagatttcgtttgtcaagcgcaacctctaaagcagtttttgacggaataccgttgaattcctgtacatgtttatcaatgaggtcaaacaaaacttgtgcattgccttcaaaatattcctttttcagatgaggccatgcttggacaaaatacgtcccgttataaatcaggttagaaaatattgtatcaacgatcattgtattgccttataccaggttgctgaacatcatgaaaaagttgtaaaccttttgtttgaatacatcccataatgtcagcttaggctttgggacaactgaacccttttcaagctctttaatctgtgcataaattgcatcatgcaccagcgggatcaacgcttctttgtcttcgtctggggtactgaattctactttcagaccatgatcccaaaacaccttatgaatataaaccagatgcgcaacacctttttcatcgttaatcagaagttcctgaataacatctttcatcgcttcatcaatataattctttgctttgctctcgatatccatacattgcctcggttatggggccgaagccccatagtttttataaaatttcgttgtcttcttcgatatcatcaaatgattctgggatatcgtcatcatccagatcaggatctgggatgctatcagtgctgtataaatcttccagcgcggaaccatcactgatttcacgatccgggatcttatacttttcttcgatagctttcaagaatggttgatgagtaaacagaggacgccagaattcaacgctatttgtttctgactcacgccatttcttttcttcaacttcgagttcgccagtctcggtattcaggaaagcacggttgcgccagcctttggttacggtctgtacaaagttcatttccattgccagatccagaaggccagaatacatactaataccgccttcataggtaacatgcagcgggaattttgatttctctttcacgaatcgagatttttcgatgttcatgatgaaatcataacccactacctcagtaccttctttcacctgttgtttacccaggatgatcgcagtatcagcggaatacattaaaccagtaccaccggaaataactttcttgctgtacatttcttgtgtgtcataggtatgacagatacaaaccatcgggatatccaggtcagccagataaggcgtaaccatacggaacataccttttaatgcttttgctcgcgtcatatcctgtttatcgttatcagacagcgcgtcagcaagttcttttttacttgccgtgttgcctactgagtcaacgaatacaatcaccttatcaccgcgttcaagcgcgttaagctggcttacaacgtcattacgcaactgctcgaccgtcgtgatacgagtatacacaacacgatccggatcaacacccattgatttcagataggatttagtaacacctttttctgaatcgtagaacaggcacacagcatcttcatacgttttgagataagccgctacagtcagcaaacctaagttggatttgaagtgtttggacgggccagcgaaaagggtaagaccagaagttaggccaccgttaaacgcaccggacaacgccagattcagaatcggcacacgggttcgcgtgatggtaatattgttgaatacgtcgctttcagaaagtacagatgcagtttggctattcgagtttttgatcagtttttttagtagtgctttgtttgacatttaatttttccgatttattcattctcattctatatatctcactagttaatgaaaggggccgaagcccctagagtttaccagtcaccgaacagatcgtttaaactggcacgtttttcataatcaattttacatacttccgtgatattagtcaatggactaataacatgtttttcaaacatacccggataatctacccatgccagaatatcactttcgatctctgacggtagtttatttccggattgccacgcgatgcaatcggcttgccacgggtttttatcccttagtggtagaaccattaccttttcaccttccatgattggtgtaacaccatcaataccagcagtgaaacggttaaagaacagcacccctttaatatggtttggtgttcccttgattggatagccagccccatcacgatatttcgaaatgttgttggcagatgatacaccagcaatttccctgtagtcaagttccttatattcttcttcgaactttttataatgttcgtgtaaagataattcaccttcttgcaggatacggcggatcgcttctttcaggaatactttcacagaggtcggagtactcgaacgctgtgtttccatacccatgattttcaatttcggtttttcatagcgagttccttcggagtcccacacgttagccgcatatcgttttttagcagtccagaaacttcccaacccttcggaacccaacggaggcccagaaatgatttcacgatccataaacatcaggtgttccacgttgttcatgtattcgcaaagttcacgataccctttatcgatcattggttccattctttctttagcaaagcgatccaggaagtcaacccaatggttattatccttaaatttagcctcaccaccaacttttgcaatcacgttatccatacaaacataaatggagtcagtatcacagtatcgaacatatgcatgatccgtagtaccgcacaggtcgttaagatattcgtttaccttacgttcaatccactggatagccaactgcccgaacatggtgatcgcgctggcgtttcgtagatcgaagtatcggaagtgttcgttacccaacgcaccataaagggagttgatagaaatcttacggttaagctgtgctgtgttcgcttgtgcgatcttcttctcacatacgcgcttaactgctttaagcatttgttttgtaagagttttcagaactgctttcgattcatcactgaaatctgtatagaaatcaaagtcaggatcaatcatttggttatgcgcgtctgttaagtgttcgagttcgtgcttgatgagttcaagatttcgctcacccgccatcattcgttttttccacatcttacgctgatcaaatactttcttgatctctactgggatcacgcctttgatatcacggcggaacatccacccgttaggagaacagctaaattcatcgctagggcgcggcgcggtcttattaatatactcttcaagagcacgtaccgcaaaacttcccataatcgtttcagggcttatattcacctgtcggatgatggaagggtacaggcttgttaagtcaaacgataccatgtatttgtaaggcccaggaactggatccttcacaaatgccccagggtaaggggttttagtatggcgtctgttttccggaataacaaccttatcttcacgcagagagttataaatgatcgcgtcccacgttttcagcggagacataacccctgggaagttaatttttgcatagtacgctacagacagaaccagttcaataaagtttcgtttaccgtcgatatcaagtacgcggataacgtcaacaatgttgtacgtgatgtacagttggtgatcgcgctggcgtagttcagacagggaaccttcatactcaactttatttttaccagtttcgtattccgcgatcgcgtccaggcggtaagatggttgcggggtaaagctgaatttcttatacagcgacataccatccatttgagcaacgccggaaatatcatatcctaattgttcgttgccgtaagcgtcagtagtggttctggcggttactttaccaaatgggctaaaatgccttaccacgttttgaccaaaaatgttcaggtatcgcgtgatgatatatgcaatatcgaatttgtcagagttccatccggttacaataacaggggttcgctctttccaatctttgatatacgcagacaataacgacttctcggtctggaaagaccgataaacaattttgtttaaatcttcttcgctaatgtctttgcgatcaacgttttccgcgcaccattccgcaaggccaccctcaaccagatcgtatacatagaatttatcttcaatgctatcgtaatgggtaatcgcatcgattggatattttgcttcacgcggatccggaaattctggggcggttacctcgatatcgagagaagcaatgcgaatgtgttcgcggttgtattcgatttcattccggtacatgtcagaaatgtaagccagtcgataatcgtccatacctagcgcttccatcccaacatcgcgcatacgctgcatccagtttttagcttctttgatgctgtcaaactgttttttgaggcaaggcttgccataaatgtctttgtatggggtttctacgccattcatagcgtgttgatacattacgggcgcatatttcgtcttacgtacctgttcggtgccgttagagtcaacgaagcgctcgtaaatggtatctcccatttgttcaactgataggtaaaattcattcattggatcttgtcttctccattaatataatgttccattgtaacaccacctacagcaaattcaagtttactcgatgttctaaaaccaacaacccttctgctaacaagtcacggatctttctcagttgaacaagctggcgttcaagtttaaacccgtcgaataacatgctaaaaatactggaattgatactatgatattttgcttctgcaatgccctgattaaccatcatgatagctttgttaaccagtagtttcctttccgttactgtatgttcatccagttgacaggttgcaagggaaaccagatcatcataagcacgttgatcaataacgttatccatacgggccgcgaaaattttattcatgtaagtgcggatcattgcgcgacctccattcttttcataaagacttcttttgcttgttggatcaagtccagagattttttaatacgctcatagaaatgagtggtttcaacttgattgcataacaatgtgtactctgaaatgttacgatcgtaaaatccaggaaagtagtgttgtgcatagctgtaagtgcgggtatctgacagattgcaagttaacgataacaagatgtcatcttttacaatcgggatgatcaaagtttcgttggatttgattgaatccatgatttcgttaatagtcataatatatccctctcaatggtgtacacccaatataacaaagcccctgcacgaatgcaagggctttttgattagtgaccgatccggtacttgtacttgaggatccaatctgctttttgcgagtgggtcagtacgcggaagttgttttcttctgcaaacttcaacccaggggttacgatcttaaccatgccccactcttcgagaagtcgcgcaatgttgttccggcgtagttcgtcttcttccgtcatatcgacttgacgaccatcgagtttcaacagttctttaaaatgcacgataaaatacttaccttgctttttcagaatgtggcacgattgccagagcattttctttttgttgtttgcaataccaatacgggttagcgtttcacggatctttaaaaaagaatcgtcgctgattagttgaatttctaacatacatcaccattgtttaatcaatttttccaatttcttttgttcagctttgtttttcacaatacccaacaaagacagagcgaccttcgcgtgttttcttttccaatcctcgaacattccgaggtctttaagttcctgcaaatattccatcgctgtacgtgtatttacactgtatttttcgcgaaggatttcgataataattttctcttcaaaatcttccgatagtttagcccatgcaccgaagcgtttagccttcctaacagagttgagataatagttatagtgcatttggtcagagatactaccgcctaccagattcatcacataagcgttatatatcgtgtctatgtgctggctcattgcgttgtctacaaagtacttatcatacacttcatcgataaccaacggagttttaccgttgttgatttcgtctatgatgttaaacaaggtgttttctttatccttgccgtactctttgaccagttcttcaaccttatcccaatctttagaaagccaagcggattcatgcggggataactcttcttcatccagaaattccgccaggctcatgattatgcctcccagaccatagaaagcatcaggttcatcaacagatattgcagatgaatttctttattcatcgccagcccgtattgcgcgttgttttcgcctacaatctggatcagtgcgattttcgaatcctgattcacgatagggtaaatcgtatcagtcaattttccgataaaggtatcgtattctgacgcatatttaataacctcagagcgcaaccctttatagttcttttctttcaacagggtaatgatatgagacacatcagaaccaacgatctcatttaggatccctgcatcaatttcaccacgtttcgagtagaacccgatcgctttgataatagaacgcgcatccggataatgctctttaacaaacgctgcaatgactttaggatcatacttgatattctcgatttcaaggataccgaaacaacgcttgattaactgtttcatcagttcgatacgttcagcatcagacggaacaccgaatttaacaggaggacaacgagaaagcagagcactatgcacaccgttaatgttgttcgctgttacaataacagaaacgtttttactgtatgcttcgataaagctacgcaagtgtttctgtgcttccgccataccagaacgatcgaattcatcaatgatgataatctttccgcctggtttctgcgtcattgatgaagcaaaacgatccagttcattacgaatgaagtttacaccacagttcgaaccgttgacaaagaacacctcagcatcaacctcacgggccaacacaagcgcgagtgtcgttttaccagtgccaggggaatcagatacaagggtcatattctcaacgcgcccagatttgattatgccccgcatagcggctttgtcaccagaaggtaaaatacactcttcaatcgttgttgggcgatagcgctgatcccatgcaaattcatcaggagatcgggagattttaccgtatttggtttcgatgatttcaatattttcactaagttccataatataccttcaaaataaatggtgtaaaagaaaggggccgtagccccttaaaactatcttacttgaatgtgctacttgcttcaagtacgacgacgtaagcaacgccgttatcagaagagaattttgcggcccctttggaggaaatctctactttgtaatcgctgttgatgaactgcatgttatcaatcttcatatcgaaattgaaaacattgtcgccttcatactcacctacttcaacggagaaagttgattgactttctttgcttttcgcggtgatgaccagtttaccatcaatcggttcaacggacaggtcggtcagtttcatcatgcgagacgctttgatcagtttttcgaaatcgttagcggtaatctggaaaatcagatctgctactggcatcaccagacgttttttcggtttcgggatcgttgttgcgtctgctgaacgttcgatgatcttcatcttgtcgccgcgaatcacgatttcaccagtggaaatatcatgagtgatttccgcgtcagtgccgacgatgttcagcatgttcaggaatgagttgagatcgtagataccaacatcttcatcaatcacatcagcaatttcagcttctgcgtatacaacgctgttgattgatttcgtcatgatgaatgaacctttggtcaacatgatcgaagagttgatttgagaaaagtttttcaggatatcaatagtttgtttagagaatttcatattcagcctttagttttcaataagtgttacttaataagtgattttacaacggtttccgctgctgtgtcaagcatatcagccatttctttaacggttgtacgcttcggatcttcgcgtcgttcgctggtaagtttacgatgttccgcaaccactttttcatcaatgtcacgatagtgtttaaaacgttcctcttgaggcatagctttaaacagttcttttgtttcgtccgagagtttagcaacccaagatttacggacgcggttcatgtagtcaacaaaaacattactttcattcatatatttcttctctaacttagaattctttgagtgggggccgaagcccccgcttgtattacatgtctaacagtttatccaggtcatcatcaccggagctatcagaatcatccagatcgaacggtacgccgtcatcttcgcctaccggaaccgatgcaacaccaccagatgatttcacatcagatgtctgattgtcaaacttagccatttcgttatcgaagttgctcagttcgctatcaaggtcagcggaagcgctggaaccagcagaaccgatcgaactacccataactttattgaagcgagtggtcaggtcagccagcggtttaaattcgctttcagcggtaatcgggcggagatcgctcataccttcgaaaattgctttctgaacttcttcatcgtcgatgtttttgatcttagccggaacaccaaacgaactatcgtcatagttaggccaatcaccaacttttttcgctttcagggtgaagttagcaccatcaaacggacaggttacagcaatacccggttcatcaagttctggattaccgttaattgcggcggtgatcttgtccatgattttcttaccgaagcggtatttgaacaccttaccttcgttttctggagcgcctgggtctttaacgatcaggacgttagcccagaaactttgtttacgaccgatctggctcagtagcttatcttctggcccgtttttgttggctttagccttctcatacagatcgttttcggaaatgtacttacatgcaggacagccgtcataatcgccgtgggtagaggaacagttctcaatgtaccactggttgtttttcttgaaagagtggctcacgatacggacgaacgccagttcatcatcggaacgtgctgggaggaatcgaataacggcggaaccgtttttctgtgcgtccagggtcagtttccattctttctcatctttctggaagccggaaccacctttcagatttgctacctgtgcctggagtttagcgggatcttgacgtttaaaaatgctgctcatattctgttttctcgtttagtttagtttgattaacgtttgtttcattaagtttcgatattttatgatatctttttcagtaaggtcaaatatttttctgtatgcctttaacttaatgctaaagtcagaccaaataatatcatcagctacttgatcgtgtttatttatgatacctaaaaatgagtcaaaaatcaaaaacgattcgtaagatatcacatttgacaggacaagtttgcttatgtaggacgttgatgatttttcgctgtacttaaacaccagagacacgggaatctctttcattttggcgaattcgtacacgtttttaacgtcatccacaaacacgttatctagtctttgtaactttcctatgtattgcctgtaaaagacaatactatcttcatcaacatcgcctacccagaaatccggattggctacgaagttggagaggaatataaaatagatttctttgaatgtaaagcgttgagctaattttacaaagaaatatctatcctttcgcttgttaaaggcgttttcactaactttgatctgccagttgtattgaaggacatcaaaacgcccctggaaatgagttttcatcgccagatataacttgtatacagacaaaggcacaagccgtgaattcgcctcgctatcagcaaacggagctttaaatctcacatgaagccgtccagagtggttgatgaactatgttcaagcgcaaccgatgggcgaagcatgtttcctttgatcgcttcgtcgctaatcttatcaaggatcgcgcgaggaaccgttttattcagcatcgcataatcaatggaattttcatccatccattgcagcgttgcttccatgtaggttgccccctcagaggcaaccagattttcgatatacaaaccgacttcggtcttatttccgatcatgctttacgccttatcgatcatatcatacagttcgatcagttcgttgttttcttcttcgaaagcggtacgggcctgttcgtgatacagtttgaacagcttcccgaaggtttttccgtcgataccgaaatcagtttttgctttggatttgatatccttgaacgtaccgttgaagatctcaacttgagttttcacgttggatgcttctttgatcagttcttttacctgttttgctacatcagggtttgtttgtaaaaattctacactcattttgttacctcaaaaatcactcagtttttcgaacatacgggaaagtttgttatccatgaagtaacgttccattttggctttacttccggattttggagtattatacgcttcaataatcgaattttcaatatcttttggtataaattcgaaatcgcgtagttcctcgttttctttgtaacgtgcggcccattcaggggtcatcaacgttgtcgggtcgtctgcctccagccatgcctctaactcagaggattttaccgctggggcgcgttcgccttcaaccttcgtcacaatataatcatttctaattttaatgcaagcgatactatcttttttatcgcctttgatatttttgtatcgcagatcgttacgtggcgaaccgtacttaggcgttacccattttttctggggaggcgaccattgacgaacaccgttatatttctgtagttgtgtaaagtcgctatcagcagaaaccactaatactcgtctaccttcaccaacagcttttttcgtaacaacagcaattatatcatcagcttccgcgaattcaacctttaatccaagataaggcatattctgacggatttcttcgaacacaggattcaggaagttgtttagacgatcccaatcccattctgattcttcgtgttcgatctgacgacgttttttgtagtaccaggctttttgcctacgccagtaatttctgtcatcgaaggcaatcacgatttctggatactcacctttaaattttacaacgttaaaccgtaaagtgtcaagcaccagatgacgaatcatttcgatcgtgatggatgcttgttcctttggtttgaagttgttcatcagtgtagcgatggaaatgttagagatatcgatgaccatagtatcatcgggttccccttcatcttgcatcagcttgttcaagttaaacatgcttgcaaaactgctcatacatacctcaatttttcaaagaacggggttattgtagtaacttacgaaatgaagtcaatacaaaagaccataaaatttttgatcaataatacttgatctgatcaaatttatgatctataatttattaattaataattattttactacaatgatcattgtaggtcaagtactaaaatcaataaattttatataatttagatctgatctatagatcattagatctactttaaccttaaataatatagaatgaaatttgattttgtctacagttattatataatattcttaacttcaaagaggaaatatgaatactatgactaaagaaacaaccaatatctacgcagacaatgaaaaattataccctatcctctgtgcatggaaaaagcaaatcgccgaaacaggtgatcgcaaaatgcctaatgagttaggtgctgctattatggatattgcaaacgggctatcacgtcgttacaacttcaaccgttattccgaagattggaaaatggatatgattgatgacggaatttccgctgcaatctcaggactgcataacttcgatgaaactcgttataccaacgtttacggttacattaacaaagcatgttggcaagcattcgtaacacgtattctgtacgagaaaaaagagaacgcgaagaaatataaattcttccttgagcacgtttacgactgcgaagattcagatatggttagtattgcagacgaaggtttcattcaagatctacatgacaaactatctcagtacgaggcttccgccaccaaaaccaaagacaaggaagcggaagtattcccaacattggaagattttctatgaaagcaataattgacttaaacaaaatattaactgatatcgattacgaaattgacttgctaccctacttcgtaaaattagagttgcaaaacgtgggaatcccggttatcatcgatccaactgacgtaagaaaccccgatttcgaagtagaagaaggggttttgtcttatatgataaacgccgaaactatgatcatggagatcacttatgattgatgaagagaaagaagtactaaccagtgtggaagaagtggatccggaagaggaaattcgacaaaagatccaggcacgtgtagaagccgacgcattgaagcgagcacaaaaattcattaagaagaaccggactgagatcaaacgcctccgtagacacgcagaggaagccctattcaggggtaataaggttcagtatgtgtatgcggttaagaaacttcgtgatatgctcaaacagccatatacagaggatttcattgatacgatgtggaacacttcactagcatcaattcgaaatatcgtagcttcacaacagaagcactaacaaacaagtagcccctttcggggctatgagggtcttatgagaaagtacttaatgatcggggatactcacgctggcttgcgtcaggacaacccctggaatgaagaaaacctatacaatgtattcgtacaaatcgtagaacactgcaaagcaaacggcattaccgaggctttccatgctggtgatttctttgatgtgcgcaaggccaccacacaaaccacgatgaaatttattcgtgaacgtattgtgccattactggaagaagccggattacatatctatgttctggttgggaaccacgattgccagtttaaagacaagatccgccctaactcaccgcgagagattcttgatcagtatgattgcttcacggttgttgatgaaccgatgacagtcaatcttgatacttctccgctacaatcaatagatttgatcccgtggatttgtcaagaaaacacacagcagatttttgatttcatcaaaaagtcaaaatctcaatactgcttaggacactttgaactgtccggatactatttctataagaacagtaaagcggatcatgggcttgaacctgatttcttaaagaaatatgatatcgtgtattcaggccactatcatcacgctaacgaaggcgctaacgttttctatatcggtacacctcttaccatgagtgcgaacgatgaggacgaaaccaggggcttctatgagctatcttatggcgacggtaaacgtgaattaactttcattgctaacccagtatgccaccatcgccggatcacctatccggatcaaaaagatgttgatgttgcagattacaaaaattgctctgttcgcttgattgtacgcgaagttgataacgatttgcctaagtttcaaacaaaactggaagaaacagtttatgagttgaacattgtcgatcgtgtgatcacggattcagaagttgatactgattttgaaatcaaaagcgtatctggattgattagtgagtacatcaacaacatgcagatcactccagaagaaaagaccgaagtatctgcaataatgagtgcattgtatgcagaggttacgagcaatggaaatagttgattacgttaatattttaaacgaagaagggcgatataaaaccctttataaaatgtttggatttgatgtgattgttgcagtacagcaggattcctataacgagtatgtgtcattggggttcactctgattaaagacaactatcacgaaacaaaggtttggacatttactgtcctgaatagcatggatgaagattccgtgatatactgctttgatagcacgattacaaacatgattagtgatatatcccaaaggataattgatgaaactcaaatttaaaacattgacttatcaaaatatcttgtcggttggtaacgtaccgatcgtcattgattttgattcagcaaagaaaaccctcattacgggtaaaaacggtggtggtaaatccaccatgatcgaagcgcttacatatgctctctttggtaagtcatttcgcgatctgaaagtcggacaactggtgaacagtatcaacaagaaaaaatgtctggttgaactgttgatcgaatacggcaatgatgaatataaaatcatccgtggacaaaagccgaaagtatttgagatctggaagaatggcgaaaaactgccggaagattcagccgctggtgattatcagtcacagcttgaatcaatgttgaatattaacctggtgggctttaaacaggttatcgttctgggtactgctggttatgtacctttcatggaactgaaaacaccagatcgccgtaaattggttgaagatttgctttctctgtctattatcagtgaaatggacaaactaaacaaatcatacatccgtggtgttaaccgtgaactggatacgctttcaatgcagattggacacgtacaacagcagatcgcaacacatcaaaagttcattgacgaacaacgggcaaaagcaaatcagaatacggcgcgttaccaggatatctacgattcccacgtagaaacagcaaaacagattaaagcgcaattggttgaacttcaaacccagatcgcagaatgtgtgatcaatggtgaagaccaaacagcaaatattcaaaaactgcgtgatggctatacacgcctctcaatgaacgtagaacagttgcagcgtcttgaggtgatgtatcgcaagggtggtgaatgtccggcctgtaaacagccaattagccccactcctgaacgcatggaagagattgccgagaatattaaaaacggtactcagaaacttacgctgattaagaacaaacaagatcagctacagaaaatcatggatgatttactaacacaacaacgtacactaaatgggctgaaatccaaatacgaatcactacgcggtacacttcaaaatgaagttgcagcggctaaacgtgttcgggctgtcatggataaagcacaggaagacgtggtgatcgacgaatccccagttgaaaaactccgtgaagatgaaaaggaacttgattctaaacgttctggatttgtcaaggaaaaatattttagaggtattgttacggatctgctgaaagattccggcgttaaagcgagcatcgttaaacgttatattccttacttcaataaacagattgcgtactatctggatctgttgggtgctgattatcagttcactctggatgacgaatttaacgaatcgattaaatcgctgggtcgtaatgattttagttacgcatcgttcagtcaaggcgaaagagcacgtattaaccttgctttattgttcacctggcgcgatgtaaccagtaaaatttctggtgttgatttatcccttctgatcctggatgaagtgtacgatggtgcaattgatcgtgatggtagttttgctgtaaaagcgctattggatgggataaatggtaacgtaattgttatcagtcatcaggatttagatccggaagatttcgaccgacatattgttatgtcaaaagtcggtcgattctctaaaatggaagttaagaagtcttaaacttgcagttatcaaaatgccagcgattcatattgctggcatcaccagatttattgcaatatggacaaatcaactgtttcctttttgcttgggtctttctatctgggttatttctgcaatacggtatatgtgaacgcagataatgtaatgaagattctgttccgcaatatggacaattccccctttctttaggtacgtttccgttcttatgggaacacgggataccctcgaacttatgtttcaatccttcattacctggtttcagtttgcagttgtcgaagtgccaacgagtcatatttccaattatacctgattttccgcaatgaggacacacaaccctttcttgttgctttttggctttactcattcgctgtctggtttcttcggtgaactctctattcctatgtgcttctgacgcctttttctttaaccattcatagcggcggttagctgttctttcctttgatctattggaaccaactgttaacatatgtgctgcaaaaacgagtttgttgtttcctgggtacatcttgactaataacagatgcgcaatataatgttgacgtgctgtaagattaaccaaattatcatcggaatctgttccgcctatgcacttgggtatgatatggtgtgattctgtatatccatcatactgcgtttgtttagcatgttctatgatagagttataaattttgttatagttcataaacatatctcttgtttgatgggccgttagatatccctatttaagaggatgaaattatgctattagaaaaatcttttgaattagaaaccgctccggaaatagagcggttttatctccacaacaattttcttgaagaaaaacatatagttactatgaaagatgttgaggaagcattcaaagataaccctatagagttgacgcgaatcaagaacaacaaaagttctgtttggttcctcgaaaaaatctattgaccgaaatccataaatacagtaaagtagcccatgtaacgaaacgtgggctttgtttttatttgaggaacaataaatgatcactgaatccaaaatgacttatcaggaagcactgaaagttttgggcgcaactggtagcgaaaccagcgccgaaatgtccagactcttcaaacgcgcatccttacgcaatcaccccgaccgtggtggtagcaatgaattaatgcagaaaattaaccaggcttacgacgtagttacaaaaactgggcctagtggcgcacgttctgagactgctggtgatgttcgcgcacgttatgcacgtcaaaagaaagaatgggaagaaaaagttgatgcttactttgtagtggcgaaaaactatttcagcaccaaatttaacgcacaggaatttgcggaatacttcaccaaatacactggattgcctaccactttcaaacaggaagtaacaaaaggtagtcacggtgtttatgcttcgttccgtttcacttctggtgatgcttactttgatttcggtttcaactgcacccctccgaatggacaagggttagccgctccggattcatctgcactgggtaacgtttctgttagtacctttgtactggttggaactaaaaaacataaaatggcaagccgtgattatcaatggggcaaaaacccagataagatcactccggaaagcctgttcccgtctaaaaaactggaaagcattttcagccctgtacagaaaaatatcaaatacaaacgtgctgattaccttgcatcattccgtaagctgttaggcgctgacattagcggaaacgatatctttgttgaagttggtacactgaaagttcgtttctatcgtcacgtattcatgcgcaaaggtgcttatgtgtttagcgcggtgtatgatcctgctgtatcgaagtatcgtccggctgcacaacttcgcggaaccatgttcgaagacgaggacggcgcttgcctggatatgatcgttgatacgttcaaagagttgcagaaactgaaaccgagtgttcaaggcgttgtgaacgcgatcgataagatgaacgcagagtttgcggcggggcatcgttcagcatcttttgttaaacgtgtagctgctcaggaagccgcgccgaagccagaagagaagccaaaacgcactgttaatcgtatcggtaaagaggaatacttcgcagcactaaaagatattggtgctcgtgtaatgcctaccagcggttatgttgaatttgataacggcgctggtgttactatcaacttcaagcgtattgttgtaaaccgtaaagcatactactcattcagtagctttgatttcatgtactctggtcagaaacacattgagtggttgaaaggaatcgatatcgcagaagataccaaaggcgcaagcattagcctactcactgatactctgaaatctttacgtgggatctctgactggaacactgttaagagcgctttagatcaaatgaattctaacttcaaggcgggtaaattctccgcacctcatgtgaagaaggaagcagagcaaaaagcacctaaacagaaagacgaaatcggcgcacagcctaccaaaccacaggcggctaagaaagatacaccggaagtggaaaaatcacaggctgttcatgcagcacgtgagaaagcgaatatgaacaacactattcgtaaaatgatgactatgttagtcaaagcacagcgcaaagacactccggaagatatcaagaaggaagttgatgcagcaattcaattgtggcgcttgacttactaatcaaatgaactataatgggaactgttaacgcagttccctttttatttgaggaaaatattatgagttgtccaacatggttacgtttggaaaatctgaaagaaggtacacaaaaacggatttatattaatcttggttgggttcctcctaccgattttcaaatggctgagattttaatcaatgctgttaaagaagtaagcgacacttacgaatgggaaaggctctattttcctttgattggtttgtatatgacgcgaaataaatttgaagaaatgaaacttgctgttattcgcgctacgattattaattcccaacaaagatttactttgaaaaatgcatggagttctgaatgattattcaagtatctgtacagggtgacactctgactgtcaccgaatccatcaataccgctcttgctgtatgtcgtgaccatatctcacaaaatcctccagtgactgagatcctggaaattgatgtttgggatcagattgggatgatcgacgcatcatatggatttaccccgcgagatgaagaactatctcgtatcgaatcatggctgaatgaacaggaaacggaatgaaactccctaagaacacaacactactaacccgcgaaaaacttcactctgttgattggtgtcctctggatatcatgatttttgatattgaatctcgcgtgatcaatgcaaaatatcaggggtgtagtattttctctgttgaattcgagaagattcgcgggtatgatgagaagtacaaagaaaaactgaaagttatgattgaagcattgggctatattgtaactgttgaagacaataaaatgtggatcgcaatatgagcatagtaaaagcggtgtttgcattggggcacgatatctaccacgatgatttcgcttttggatatcagcaaggcttgccgtggggccactgtaaagaagatttacagaacttcaaagaagaaaccgccgatagcgttctgattatgggtgcaaatacgtttacctctcttccgggtaaattgcctggtagaattcattgcgttctgtctggttccggtagttttttgaaaaccaaaaaaggcgaggttgctgattacgtgatccacggtggcgggttgtctgctgctattggtacaatgcaagcaacacacccagataaaaatgtgtgtgtcattggtggtaaggggttgcttttagattcaatcaataataaaatggttgatgaagtagttttgacacacatttacggacatcatgtatataatgcccccgcatttaaacgcgatgtttcgtttactgcttctgaattgggtgatgcattgttaaaatatgaattttctgatttcgaaactcagtacatcaaagaacatgaacgcattgaaaaaatcatagtcgatcgatataaaaaggtataaaatgaaacaatatctggatattattaaacttgtacttgataacggtgttgaatcaactgatcgcactggtgtaggtactattcgtattttcggcgcacaagcccgatgggatctaaacagaggtttcccagcaactacctgtaaaaaactattcttcaaaccgtgcaagcatgaattgcaatggttcctgtccggttcaaccaacgttgaagaacttcgccggatgacctggggtgaaaatagcgataagcgcacaatctgggatgataactatgaaaaacaagctattgatttaggatatgattctggttatctggggccaatctacggtcatcaatggcgttcgtttggttctctttatggggatgatgatagttattatggcggttgtggtgttgatcagattgcaaaagtcatcgaacaactgaaatcaactccagacgatcgcgggatcatcgtttctgcctggaaccctgttgatcttgatgatatggctctgcgtccgtgtcactgtttcttccagttcgttgtaatcaacggtaaactgtctctacagtggtatcagcgttcagttgatgtcttcttagggttgccgttcaatatcgcctcctatgctctcctgacgcatattatcgctgatatttgcgggtacgaagtgggcgatcttgtttggactggtggtgatgtccatatctataaaaatgcggttgaacaggcaaaagaacttttacagcctaaccgttcaccaatgccattaccgattctaaaaatgccgaaggtaaatagcttacttgatttagatcaagaattctttgactcgataaccttagaagggtatcataatcacggctctctaaaagctgaaatggcagtatgaaaaatggggcttcggcccctttcttaacaaggtaagagaatgaatgacattaaagtagtagtaaaatcctctggtgtacgccagccgtttgacaaagaaaaaatatacaaagtgctcaagtgggcctgtgatggtcataatatcgatgttcgtgcattccttgaaaatgtattagaactgatccgcgatggtatgactaccaaacaaattcaacgtatcgctatcaagtatgcagcagatcatatttctgttaaagaaccggattggcaatacgtagcatcgaatcttgaaatgtttgcattgcgtaaagacgtttacggtcagttcgatcctatcccgttctacgatcacatcgttaaaatggttgaagcggggaaatacgataaagagatcctggaaaaatacagcaagcaagatattcaagttttcgaacgtgcaattgatcatgataaggattttgaattttcgtatgctggttcccaacagttaatcgggaaatatctggttcaggatcgcgatactggcgaaatctttgaaacccctcagtatgcgtttatgcttattgcgatgtgtctgcatcaggaagaaactgggttagcacaggttacgcatatcgttgatttttataacgcaatttccgatcgcaaactgtctctaccgactccaattatggcgggtgtacgtactcctacgcgccagttctccagttgtgtagtaattgaatcgggtgattctcttggttctcttaacgctgtaacctctgcgatcgtgaagtatatttcacaacgtgctggtattggggttaacgcgggacatattcgcgcaatgggttctaaaatccgtggtggtgaagctgttcatactggtgtgattcctttctggaaacatattcaaaccgctgttaaatcctgttcacagggtggcgttcgtggtggtgctgcaacactgtattatcctttctggcatctggaagttgaaaaccttctggtgttgaagaacaacaaaggcgtagaagaaaaccgcgttcgtcatcttgattatggtgtacagcttaaccagttgatgtataaacgcttaatgaatcgtgattacattacgctgtttagtccggatgttgctaacgatcgtctgtatgatctgttctatgaagctgatcagactgcatttgaagaactgtatgaaagcctggaaaaagatccaactgttcgtaagaaacgcatcaaagcggttgacctgttccaacttttagcacaggaacgcgcacagacaggacgcaaatacattttcaacactcatcacgtcaaccaacagggtagttttacggttcctgtccgtatgtctaacctgtgttgtgagattgcgatcccaacgtcgccgctggatgacgatgataaaatggctggtgaaatcggattgtgtacgctaatggctatcgttctggataacgctgatatcagcgaattcccgaaactcacgcgtattgcagtacgtgcgcttgataacctgttggattaccagaactaccctgtaaaagccgctctgaaagctaaacagcgccgttctctgggtgttggtatcaccaactatgcatcatggttagcgagcaactattgcgactactcagaagcgtatacagacaaagttcatgagctaatggaagcgtttcagtttaaccttctcgttgcttctatggaactggcgaaagaacgtggtgcatgtggattgtacaacgataccaaatacgctcgcgggttactgcctatcgattggtattgcaaaaccgttgatgaactggtagcacctgtttataattgcgattgggaatggttacgtagccagattaagaaatacggcttgcgcaactctactctttctgctttaatgccttgtgaaagtagttcacaggttagtaactctaccaacgggatcgaacctccgcgcggtttagtgagtatcaaatcttcgaaagaaggacactataaccaggttgtgcctaaccagaataaccagattgatttctatgatctgctctgggatatggctaaacgcggtaacaaagggtatctgtctcatgtagcagttatgcagaagtttgtcgatcagtctatttctgcaaacaccaactatgacccggcaaactatgaagacgggaaagttaaaacagaagacatcattgatgatctgctgtatgctaactactacggtgttaaaactctgtactatcataatacgcgtgatggtgctggtgatgaagaagaatccgccgaagattgcgcgggttgtaagatttgattaatgccccttcgggggctttttaaaggtaaagacatgttaacagtaatgaatacaaacccagatcataaccacttagaacaacctatgttttttggtgaagatactggtgttgcacgttatgaatcgcagaaacacaaagttttcgaaagcctgacgcaaaaacagctttctttcttctggcgtccggaagaagtcgatctgtctactgaccgtatgcagtatgcaaaacttcctgaacatgaaaaaatcattttcgattctaacctacagtatcaaaccctgttagataccattcagggacgtgggcctaacctcgcatttttgccaattgcatccgatgtgagcatggaaacctggatcgaaacgtgggcgtttagtgaaaccatccacagccgtagttacacgcatattcaacgtaacttgcacattgatccttctgtacagttcgaccaaatccttcgcaatgaagcgattatgaaacgttccgcatcaatgacacggtattatgatactctaattgatgaatgtcataagctgaaaaccatcatgatgctacaggaacaggttagcggctataaaccaaatgatccggctgtcgtgtattataacgagcaatacactaaacaggccactaagtgcaaagaagcgctgtacctttgtatgcacgctgtgaacgctctggaagcgatccgtttctatgtgtcgtttagtttcacctttaactttgccgaacaaggcaagatggaaggcaacgcgaaaattatgcgcttgattgcgcgtgatgaagcattgcatcagaaaggtactcagagtaaaatccgtttgtggcaaatgggtaaagatgatccagaaatggttgaaatctcccgtaggctgaaaaaagaagcaacggctatcttcctggaagtatatgaacaggaaaaagaatgggctgaacatttattctctgttggtgatgtagaaggtgtatcgctgaaaagcactatcgcttatattgaacaccttacagatcagcgtatgcgagcggtagggcttgattctccattcaccccgatccctaacccgtatccgtggatgaataaatggctcaaaagtgataacgtacaggttgccccgcaagaggttgaagtaagttcttacctcgtcggaaacttgaatactgaaatcagtgatgaagcgtatgcaaaatgggccagcaaatacgcgtgattgtcgggtagtaaacaagtacaaaactgattgggatgtcgatattcaaagaggtacgaagttcggcaacccttatcacacaggaaccaggggagaaaacattttagcgtttatcccctggttccagaatcaggttcgtactggggcgatcacgattgaagaattgaaagaacttgatggaaagaggcttggttgtacctgtgcgcctcttccctgtcacggtgattacatcgcgcatgtggttaatgttttgtgtggtaagaaaagatcacttgactttttggatatataatgtatgaaatctgaattcaacttaacccttgataaatgtggtcgcatcgatcgaagttttgttaagtgtggtgaacttaggcattgtgtttattttattgcaattaacgatgaaatagtatatgttggtaagtgtagggatatgtggaagcgtttagacacatatcgcaatgcaaagtattggagagaagccaaccccagtaacatcttaaaaacgtgtcgattggaaatggctatcaaaaaacgaaaaactgtgaaacttatcgtgactactcacgatgaaaatacatatcatgattatgaaatcaacatgatacgaaaatacaaccctgaatggaataaacagcactatgacaaaggcacaaactaaaattatcaataccctttacaaacaactcatgcagttgtgtggtgaatccgaaacatttttcttcgttgatcaagtaaccgtgatgggtacacctgttcgaatctttaactatcgcatggcctcatatacagactggctaaagcctggtgctctggaatgtcgcggtatcatgtttgaaatggatggagatacccccgtatcaatcatcagccgccctatggagaagttttttaactatgccgaggtaaaggcatgggaagcgcttaacgagtctcctattgaattaggcgaagttttagacgtgatgattaaagaagatggttccttgatctcaactttccttgacggtggatttctggcggtcaagtctaaaggttcggttaaatcagaacaagctatggatgcgcacagcgtgttaatggcaaatcgtgaattgctgacccgcttaactgagatcgctaaagaaaactatacggtgaacatggaatacgtttccccgaaaaaccgtattgtcgttggttatgattctcctgatctgcgtatcctgaacgttcgtcacaacatcacgggtgaatacatcccttatgatgaactctttgctgacgcgctgttacgtgcgtatctggttaagcgtgagaatatcgaagtactggatctggatgcattcgcaaaagaagcatatcagaatgaaggattcgaaggctatgttgttctgacaacgaaaggttttgtaaaaatcaaaacaaactggtatgtcaatctgcatcgcacaaaagatagcattaccaacaataaggatcttttcctaaatattgttgagaatacggtcgatgacctgaaacagctattcagttcggatctggtctctctgaaaaagattgacgatttcgaaaaacttttccttgatagtctcaatcgtttgagtgcaaaagcgttcaaagccattgaagataataaagggaaatcgcgtaaagattttgctatcagtctaagcgcggatttgtcaaacgacggtcggatcatcttcgggcctcttatgaagtacttcgaagaaaccgatccacaaaaactggtcgatcgcatcattgaaatgatggttaaaaattacgatcagttcattcctgaacaatataaatgaggttcataatgcctaagatatcatcttgggtatggcctgtaatcgtggggctatctttgatagcccttttttacattgcagtcgataccaaaatcgaaaacgcgtccttacgcaaggatatcaaatctttgcaagatgatgtgaagaaagtaaaagagacaaatacaagcaatactgttatctacgtggaacaaaaatccaaagatcagcagttagtcaaggatgcagggcgcaaacaccttttgtttgagaaacctggattgattgaaatcaaaatcaacaaatccttcgacgaatacatgcaggaatttgaaaaatgaaattagcaatgatagtattacttggtgtttttctcgttggttgtgctgaacagccacctgttaaggtacttcctacgttacccgcaaaggttaacccagtgaaggtaaaatggaaagtaattgcagacgttagagaaatcgacgggaaacaataccttgtaatgccatatgacggtaatccttatgttgcattgacatatccagattcattgattttacgtagctggatgaatgacgttaaaagacaaaaggatcaaaccgataatgttctgtgtacgttgggataccctgagaaatgcaaatcaaaataaccaaaacgttttttcgtgacataacagaaggaaaagtttatactgcgaaaaaggataaagaaggtctatggatagaaaacgattggaatcgtgatatgtggctcaatctgacgaatgagtataacaaagaactaattgaatatgagatagtgaaatgaatctgtttatgactattggcgttcctggtagtggaaaaactacctgggcgcatgagaaagcccgtgaattgggtaatactgttacgatatctcgcgatgatctgcgtagctctttgtataatgctggtaagggtgccggcggatacaaatacaccaaagctaaagaagaaatgattgcggaaatgcaggatcacgttgttatctccactctgaaagatggtaaaaacgtgatcatacacaacacgcatctgaaagaaagtgataaaaatcactggcgtgaaattgcattggaacacaaagcagattttcatatcgaatactttgatgtgtccattgttgaactgcttcgccgtaaccacaaacgcggctgtgatgcattacccgtttcgcgtgtttgggaaatgtttaaccagtatcgtaagatccgtgggttcgtaccagcaatggaaattgtcaatccccacaatcagaaatgcgtgatctttgatgttgacggtacgctaacaaaagtagggcaacgtagcccgtatgactttaccaaagtgatcaatgatccgccaaacatcccgatccagcaactgtttcacctgtacaaaaatgcagggtataagtgtgttgttgtgtctgggcgtgaaggtaatccgcaatgcgcacatgatacatgggttagcctgttgagttatggcgttgaaccggatgaaatttttatgcgtcaagaaggtgataccaggacagattttgaagtaaaagaagaaattttgtttgacaagattttagataagtattatcctgttattgcagtggacgatagagacactccggtcgggatgtggcgagcaaacgggattccgtgcttacaagtcgattatggtgatttctgattgacatataatgtgggtatgttaaagtacccacacaaaagaggattatattatgaacgttattcgtgaagataaacacatcatggttgaacttggcgatcgcattcgcgtagaaaatctgggcgattttaaccaaaaagttcgtttgttgtgccaaaaaattgctaacaaaattcaggaacagggtaaagctccgggcgggtttgaagttagcgccactccggtttctcagtactcctatattgtgtatattcatgacgtggatactaacagcacccaatctttcgggctggtgttaaatcctattactggctacgttacatgggcggctgtattatgaaagtaaaagtaattgatagagcgatgatcacggatgaatctgtatacccagatcctcgttattatggcggtgttttcggatacatcaaaggaactgatattgatgtagtaacaagtccgatcgccgaatacgatatcaacaaagatcagacagaagttcgcgttactacaatcaacggttcagaatatatcgttgaagcgactcctgattttatcaaacagttactaaaggtgatgaaagatgcttgatcatcctggctctatgagcatggtgcttctggaagcattaaaagcatatgatattccttgtcatttcggtgaagtaactgttaatactatcattgacgaaatcgacaacccaaatactttcattgcttgtcttgttcgaaaattcacaagttgttttcgaccgagtccagaaaaagtagtaatcagttctgtttctgcacatcatcgagtgttagatgatggaaagattcaactttactggaaagttctttatcacgtggtgtatcatgaagattgatgatattatgtttatgcttagagcaataagtgcttctaagttctctcaatgtgtctctgttaatgttggtgctgcattgagaaatggtaacgggcgtgtgtttgtaggcgcaaataatacggttgatcctagtcatcgttgtacagatcagtgcaatcacttattagatgataatgggaaactgagtgaagaaaagcgccctgaacattcacaatggtcagatcgcaacgaagtacacgcagaaatgcgcgttattatgctggcggcgtctcatgaacaaatcaaagacgcaactttgtatacaactcattccccttgctcacaatgtgcgaaaaatatcgaattttgtgttgcaacaggtatgattaagcgtgtagtatatctacataaatacgatcgtggtggcatcgagtggatatggcgtctacagcaatacggtgccgaagtagtacaacttgatcccgaagaattgaataaacatttccggattaaataaccaatgagtaaatgtatgtctgaactgagtgtaaaagcatcctttgaatatgttctgattgaaaccaacgctaaagcggctggaactgaaattgtatcaccttctggtattgtgactggtgttcgtcaacacggcgaggaaccgatctacggcacagtgttatcatgtgggccggatgtaccggaagaatataaaaccctgcttatgggtaagcgcgtaccgcttcctcatgcacaaatggcaaacgtgccggatcctgaactgattgcaggaaaggcaacaaaagaagaagctcgcaagtatccggttaaatatgtaaccgcacactataaagcgattcaagcaatttacgaataagagatccaacatggctaaacaaattcaagcaatcatcgccgataccgtcgcaaaatctaaaaaacttttcgacaaaggcgacatcctcgaagcaccgacccgcatcgatgtaatgacttcaatgatcattgatgctcaccagggaaaactgaattcccgtgcttcggaagtaatggaatacatcgtacagttcgaggatgtatgcaaatacgccaaagctgttgatccggctgttcgcgaaatctaccgcaaacagttctaaaaataacggccccttagctcaataggtagagctaatcactcataatggttaggttcccggttcaagtcacgggaggggccaccaaacaaggcaaggcacttagagaagcgggaggaacagaatctgattctgttggttgtaggtgcaaatcctacccttgccaccaaattagggtgcgtagcgcaatgccgttaaatggttcggaatatgcaacctttctcacggagaaggctctgttggtatccggtaataggttccccggaatgcggggtgaagtaaagaaacttccagcccactaatttaatgaggtttatatgaaatttcgtgaaactgtgaaataccataatgcggtcgaacatacgcagatttttgttgatatgtctcctgcaaaattcaaagaacgctatggtatgacatttaatgaatggaaaaatggattacccgatggggattatcgaaaaaacttcaaattcagtgaatgttatgtagatgacgatccttacgatctggatatttttggtaaaacaacgcctctcattgagaattcgccagaacagctttacgaatcttgtattgactctgcatacgaaatttaaagagataacatgaaaaatttacaaaaactgtttgaaatgtctccggcaattagaaaaatcatcggagaaaatagcaatccaacgaatcgcaataaaaaattgatggaactttttgtaaaagagttcgatgattttgattctgaacttcataaagcgcttgaggcatattccaaacaagggttctttgcatcgccgcaagtaaatagcaagaaagagtatagcgaacgattctttgattgggagattgtcaatctcgttcgtagaacaaatatatctccgagcaatcaccaattgatttctcttgatacttcggtattctttatccagtatcttatcagtggtggtttcaaaaatcctgaaattccgtttacaaatgaagcggttagcagtgaatttgatgaatcatttgtatacatcaacacaaacaaataatcaaatggctatcttcggatagccttatttttggggtgtctatgcgctttttaaagtatgcaagttggatcgtactcgtccctcttgacattattactggagtattagcaattctgtttgccccgtttgttgtaccgttctacaacgagaaaacagggcatcttcctaaaggcttccggtggatggaaaccttcgataaccctattgatggtgatggtggacatatccgccgttgggcgtccatacgctatcatctgggggattttggggtgtacatgcaacgtgttggctggttgtggagaaacaaggcttataacttcgcatatcacgttttaggacgtgaagcgacaagcaaattcaactggaaaggcaacccaaaaacagaaggtgggccgaaccctgtaaatcatgggtatctgctcatgtggaacgaatcagcatggggtttgtacgtttacaaaccgtggctacggatccacaaagtgcaattctgtttgcgcgtttatgctggatggaaactgaaacaagaagttagcgacccagttaacctggatcgtgcaatgctggcgtttcatttcaacccgttcaggtattatgtaatcaagtaaaggtaatacaatgaaagcatttcaaattttagaaggtttgcatactggtacaatctatctggaagaaggtaacgacgttcggatcgtagtatcaaaaacattaactatggattctgtgatcggcaaagctcgcgttactccgtttgcaaagcgagagatcgagatcgaatatcagccaactgttaaagtggaaggtggacaacatctaaacgttaacgtgttgcgccgcgaaactctcctggatgctgttgaacatcctgaaaaatatccgcagttgacgatccgtgtatctggttatgcagtgcgttttaactcactgactcctgaacagcaacgcgatgttattgcccgtacttttacagagagtctataatggcaatttctgatattacgggttataaaccccatactgataaaaaagtagaaacagtaaaccgtatcaaagatgctgaaaatgcattaggtgcaatcctggaagatatcgaacagcgcctatcaaattcagatattgattcgctgatagatgaagaattagatgaggtgcttgaacgtatccatcaaattcaactggcgaaagaccgactgaaagaagcctctatgtgggcgtgtcgtgcggtgtttcagcctgacgaaaagtattaaaaatcaagccgttgccgaaaggtagcggcttttttcgtttttacataaaaagttgttgactcccttcgcacattcccttatagttaatcccgtagacaagaaaacacttttatgaggatgacattatgaaacgctcttacaacatgaatgaactggttttcttcaaaactcgtcgtgaagcacgtgcttacgttctggcggctggtaaaaatacttctgctgctatcgatatgggtactgataaagctgttggtgctcgttgggccgctgttatcgttatcgctgctccggttactccggttaaaactctggtacttggtgcgcgtcacgccgaaactcttaacactgctgcaagcggtaggggccacgaagttaaagtgttcaagaagcgttcttatctttcatgtgcaaggggttaactatggcacgattcatatataaagtggaatacgaaaatactgagttatctgatacctttttgaagatgattcgtgatcacgggcaacgtctggaaagagtaacgattgatactgcgtttgattgtcctgttgggttggttctaacattatcttgcagccccgcaaaagaatcagcccgtgtcgaaatgttacataaactaaatgcattttatgaaggtggtagtgtatggcgagtattgtaaaatttttcaccgactcagtgaaagaaattaaaagcgctctggaacaatggaacactcgttgtgatgtatccattaaatcagagtacgaaacaacttatgatcgttatgatccggcccgtggtttgcacaataacccccatgaggtggaagtgtgaaatactacggattcaaaacgagtcattttggtaaagcgtatcgcacagaaaacatcgatcgcaaacgtccgtactatgagcgggacgtaaacgcgctcgccaggaagggaagaaagagggtgaagatcgtggataactggaaaacatggatatcaattatcgttggtgttatcatcggacgcggtttgtatgatttaatcttttcaataggggttaactatggacattggttcgggtagtcagtacccatcatgcgcgttaagcaacttcgctccgcatccgtttacgtttgacggggtagaatgtgcatcaatggagggctttttgcaaagcctgaaatttagcaacccagatatgcaagcccatgtatgtactctggtaggcaaggccgcaaagttcaaaggcaaaaagaaaaaatggtggactaaccagaccttatactggaaaggtatccctattcatcgttcctctgaggcgtatcaaatcctgattgaaaacgcatataatgcgttattccttaatgaagggtttcgccgtgcgctggcagcaaccggaaaaagtaccttgacacattcaatgggaaagaataagatgaatgaaacggtgctcactgaacgtgagtttgtccgaaatttaacccgattgagagatctgttatgagtgaaaaagaaagagtagaatgcgtgtttctgttcaaaggcgcgattaatccattagcgttactgtatgcgcaacatgcattacgttcaacgttgattcagagtgttatctataaagcaggtgtgtattatgttaccatcggcgcaaataacatggttgttattgaatcctatgttaaggaatgtgcatcaaacggcgttgtctttgataaagtcgattttgatgcaggggtagatgctgtttatatgtataagggttgatatgagttacgtagtttatttcgattgttcggatctcgatccgttcgtgcttcaacaggcaaagaaatatcatcaagatgtcgttggcattggtgtaacaaatgatgatatgttgtgcatcgaatttgaatattatcggacatttgagcgtgaacaattcctgggtgaattgaatgcattcaaaagtacccttttctttgatcgttatgaggttatatcttgaaacctgttattcttaccgatattgacgggatcgccgtaaaatggcaaagcggcctcccgttctttttgtctaagcacaacatgcctactgatattgcattagaaatggttacagatgaaaaatttcgtgatatgaccgaaatcttcggatgtgatcagcagttggctaaaatccttatggaagaatacaataacagttctttcattcgttatctgaatgcgtatgatgatgcattgattgtgatcaaccgtctgaaaacgcagtatgatttcgttgccgttaccgctctgggaacaacaccaacggcaagccttaaccgaattgctaacctgaatactctttttccttctgcgtttaaagaggtgatggtcgtgggtcacggtgaaacaaaaactcatcgttacctggaagcaaaagcaaagtatggtaatcgtctggtttgctttgtcgatgatctcgcgataaacttaaacgaatgtcataacgtcattagtcaattgccgttattccatatgttacgtggtgaacgtgaagaaacaaatgcacctcaccagttagtaaaatcgtggtttgaaattgaagagaaactaaatgatcttgtcaatccttaatgaacttgcttctactctgaaaactaaagagaaagaagcaattttaaaacgtaatgcagataatgaattgttgaaagaagttttccgcattacgtatacaaaacagattatgttttatgtgcgtcaatttcctctggtagaagggaaaccaggcacaacaccgctttccgatgcaatcaaagcattactggaagatttagcaagccggaaatatacaggcaatgcagcgcgtgatcgtttactggatattgtatcatcagtgaacattaacgatcgtgaagtgctacgccgtatcattaaccgcgatctggaatgtggtgctggcacaaccttaccaaacagggtatggaagaaactcattcctgaacagcctcaatgcctcgctacgccgtttagtgaaaaggctttacgtcgcatcattttccctgcttactcgcagcttaaagccgatggtgcgcgttgcatggctgatttgctggaagcattaaaccgtaaggtatcgagagcgggtaacgagtacgaagggttaactcagcttgatatcgatctgaaaaagattcgcgattatctgggatatgatgtagttctggatggagaattgatttatgttccttccggaaccgtaccaacattacctgaacctgaaacagacatgcctttttctttatctgctttcatggacgatgatgataacgacattgcgttatttgcggaagaagttcgcaaagtatcgaccccagaagaagaacaggccgaagcaaaacgcgaagaagggaacgggatcgtaaacaaatctctgaaagggacgatcaccgaagaagaacagcgaaacattgtttatgttgtttgggatattattccatatgaggtgtattacggcgaagctgaaagtgttcagacttatgatgagcggtttagcctgttgcgtgatatcctcctggatctttctctgccttctgttcgtttgattcagtctaagctggttaataacattgcagaagcgaagcaggactataacaattaccgcaatgacggtaaagaaggttctattctcaaaaacagaaacttcaaatggaaagattcgcgagtagccgatcaggttaagctgaaaaacaaaaccccgattgaactacggatcattgatatctacgcgcacactaaagaagaccataaggtcggcgggtttgtggtggaagatttatccggaatggctcgaacgaataccggatctgggttaactgataccgattatcgttacgatgatgatggtattacccgtgtatacattccattagatgaacgtggtgaactggatcgcgaatacatcatggcgcataaagatgaatacattggggccattgtagaaatggaagttgacggcctccagaagtcgaaaacgcgtaagaaaggggaaccggaatacagtttcttccttcctattatcaagaagataagacgcgataagaccgaacccgacgatattcatgttgtctttgcagatctattttaataaaaagcccttgactccggtcgggggctttgttatattgggcctatcgaaacgtaaatcactaagagaatatattatgactagtagttatcagaaacacaaaacccttatggcaaacctgtccggtaaacatatcgacgaagtaaaatctctgctgacagtgaccgaaggttcccgattcgaaacaaatcacattatcaaaccttctgtgaagaaagtactgaaagtgatttaccgacatccggtgtatcagtgcgttcatatcatgaacagcaacgcatttattttcgtatataacgaatccgatgataagtgtgttggtattttccgaaaacctaactttgaatgcatgagcgaagcggctgttgcaaccccgatcgttgaagaatatccggattatgttcaacgcaacatgcgttatgtgcaatcccgacttgattatgcatacgatttcaattctgacgcggtagaagcgctggcggatatcctttgcaaaaaccagaaagatcgtcaaatgacaaaatatctgactgatccaacaccgccaacaattcgaatttctgttgaagttccgtttgaaaatcatttcatggcagttgaagcgcttgctaaacttggtttagaagtgaaaacagaagccgtttaatagcactttttgttaaagaagcctcttgcaatgcagggggcttttttgtatagtgtgttcattgaaacgaaacacggagataaacaaaatggctcacatgatgaagaaagcagaattccttaacatggttaaagattgcggattcgctcacttgaaaacttttcgtggtagtgtttacctctatgaccgcgaaatccaggttgccgaagtctattgcgcttctaacatgcaagaatctggcattatctctgcaatgaaccaatcaatcaaataccgtaaatggatgggctgattatgaaagttaacgtttcttatgaatctcgcgttaatggcgcacagtggcggaagctggataacggacaagtggaaaggcgcttacctggttccgatgagtggacacttgcggcagtgttggaaaccgaaatcgatctggcaacaaaagacggtattttgtttgaggtgaagaaatgatcacactcagtgattatcttctgtttactgctctttgggcggcttcgatattcataactgctttgatttacaataaacgtgatgattttgggttgtgggtattcattcacgggtttcctctttctatgtggatcgtgatgactgctgaaattctccattaatagcactttttgctaaaactatcttgttcttgtttggtatagtgtgttcatcgaaacgaaacagacaaaaggaacatcacatgaacttcatcgatatcaacaaagatttggaaggtaaaaacatcaaactcgttaaccgtgaaatgttagagagtcttggtaacggtggcgaaaaattcagtgaagaattctataacaatttatcgttgatgacggtcaagcgcgttgatgttcagggtggttctggttgggtttctgcaattccggtttcccttgtagatcaagcaacatatgacccagttgctgattcatgggatctggaaatgccgttggtattcgaagaagtcatgaagtgttacgaaatcgcataagggtattattatgaatagcggaaaattacaaatggaagttagcgaagaagaagttaaagagcggttatcggtagcaagaagattccttgaatctatcgaccctgataaacttggaaaatgccctgatacgatttgccttaattgtgggcgttctgttcttgttggtaaatgctgcgataatccaaatatagttgtgatggaaaaggaacaagtatcccccgaaacatgggatcagatccaggaaatcattaaaaaccctccagcgccaactaaaaaattacgtgaattgatgacaaggaaaatgaaatatgagcaaatttaaattgagtgcaaccgttcgccttattcgttggaatggtgaagagatccgttatgatgacccagaattcgcccatgaaattctttcgcatcgtttgggattgaaaaacgcgtcattggttcaaactgttaaaacatcagcagagccggaaatttggcgttgtgttattctggatctcgataacaacattgattatgatgatcctaagaactatccgcttctggaagcacaagttgagaatgctccagaagacagacagtgttttttggttgagttgccacgcgaacattacgaaaacatcataaaggcccgtaaaaaggtcaataacaatgttttcgatctccacctcggattgtttgaggattaagtactgctagttgtgttcgtcgtagcggcgctggtaggttcccccacctgtatacattcaagtgtttgcaggtggaaatcttttgatacgtctcgaacacattcaacgatcagatattttcctgcgtactcttccccaaatacctcaatgattgcccctaccttaacatctaaacgaccctgctttatatcgaatcggatccggcgttcatagctggataacaattgcattttagacgcctggaaaggtttaccttctgaatctgggttctgaaagttggtatcatagattgcattacggtttgtgaagatccatgtattctctgtgtctgtatcagccagtatatcaccgtacatctttttatcagtcaatgacagactaaagaaactggcgtctttaaacagcgttgtgttatccttatgggtaatgtactgggcttctgtgaatatgacagtatcgccaacaaacacgttatcaacgttaaatttgtatgctgggatcggtgtctgggccagaatgtcagttgaacttttaaggaaaataccggaaccatcttcccacagataacagaaatcagaagaaactacactttgcccgttgtccctgatataatcgaatatatcctgatatgtaccatttagacatccaggagggatacgtatgttaccgccgtcaacttcgggggtaagtagtttcattttgctatacagtgccgtcatacactctgtaatcgtctgtacggcgttgttactaaatgaacgggcaaacttacgtctgaacgttttatgcagcggagagaggttcatacgcagcacagagcggtttttatcgtcagtatctacgttagagtaaagcaatccgtaataatgttgttcctgtgtaccgttatactggaaagatacctgtatgatcggctggataagttgctgatagattaactgtgcgtcgtatatctgcatcagcgtttccgatgagccgttaatcatcgtcttttcactaaacgagacaagagcgggtagcaattcagtatatgcgttatcaatgtatttttcgtatgatgtatataatttaatcgatgtgactcgattgacgattttttcagccataaaaatccctcctaatatatcctatttactaaatagtaaataatgacccaggttcaatttgaggcaataatgaaaaataaaactcttgataaatttatgactacacggcttgaaatcaagaagactaacgttaaaaccgttcatcttccggatggaacagccattgagatccctaagatgtcgtatcgtcattttgtaaagattaagactctgaaagatgacccagttgcgatcatgcgattcatcattgatgacatcaaaccgcgtgaactaacagcagcggaaattgaatttgtgttgatccatatgtatgcacacaataacgctgattatgccaatacgcttaaagaaattgggctaaatcttgatgacctcaaaatctccgaaccttgctatgattttacgtttgacaatgtgcggttagtctttgacaaacccagcctgttaaatgctcaccttccgttcctcatcaaagaggcatatgttgacggtaagccagtagaattaactgaggataaacgagacgaattaattaattgcctgtaccgattcgaatatgatcaggtatcgcgtggtgtcctccaggaagtatacattattcatgaggggaaaaccatcaaagggcttaacatcattggtgaatgataatggctaactcttatttcaacgaagaacaaaagaaaaagtttctgaacagaaacagcaacaaacaaccagcggtcaccaaagtaacagcctcccttgatgctgaaagcgcccgtgacctaaaggaaatcaacgataacacccttgaaagtgcaatcaatactcttgatatcaaagaagggttgaaatcgttcgaagaaaaattccgtgacaaattcgcggggttcaaagaacaatacgaagaggataaaaaggaatcattagccgaacaactacctgatttcgtcggcccgatccgtcctatatccttaaccgatgataactcaaaaactgttgacaatacagtaaacgttaaccaaaatggtcagttcggtaagctggaagaaaacaccgaatctatttttcatgctattaacaaacttgttgatttatatgaaaatactgataagcataaaccgcttcctgaaccagtggaagaacctgatccgtatgtagacactaagaaaaaacgcatcattgatgatgaagacaaaagaagcaaaactctggatagcattgctaaaagcctggtttctattaaagggtttacatcgcagatccttagccgtttcattggttactctctggaagcaatggcaaagtttgctaaatggacgctccttattggttcgttaatctttacattcgatgtgttgcgcgtcacaatacgcaaatggttcgaagatatcctgaaagaaggggaatcctcaaagaaactatttggtacatatctgggtaacgtaaaggctatcgtaacaaagatcgaagaaggtttgaacaacttcaatatgaataacttaggagaatcactccgtgatttgttcgttgagcctatgaagttgttgggacaaactgtacaaacggcaatcactgagggtatcggtcgtcttattcaatcattgggtgaatcaactggcatagacagcattaccaatgccggacgcggaatgcagatcaccgctttacgtgataaacagaaatttggtcttgagttgaccaaagacgatattatcatgattaagaaacaagaactggcagaacaacaggaagcattggaaaaagaagataaagccattgcagcacgtcaggcgttgacgatcactcctagccagatccccaacggttcgatctacaaagtagctcctactgattatcaggaaagaaatcagaagattgtcgatgctgacaaagaacgtctggatactatgaaaaaacacaccgacgaattaaaaagtcaggtgaaattgattgaaggcagtgcagaagaagcacagaagttagccgatgaggaaaacaaacgcaacagagagcgtgttcgtcaggcacaaatcgaagcggatcgcctgaaacaagcgcgtaaggaaggcaaacaaccgccagaaggatccgagaaaaaaggtgatgatctgttgggtaaagcaaccaactatgctaactctgaaaatctggatgcagccgatatcaaatacattaacgatgaactgttggatcagcttgaaaaacgtcgtaatgaaggcaatctggacgatgtacagaaggatagaatctctgaccttatcgagcaattgcaaaacaagattgcagcccgtacagaatccagcgccccgatcgacgcacagccaccgttagcagcaaataaaccggatgctgataaagcaagcaacattcaggttaacaacaaaactgttaacaacaacgtaactcattcagtacaacgcacagagcataaaccgctcgtagcgctggcataaggaacatataatgaagttttctattattgatgacagtataaacactctcaaaaatattaaaaatcgcggtatcccctctgggggtgccgctatcacagaatcagtattaaagcaaactatcgttaccgccgaatttccggcccaacgtgcagcaggtatcgataacgcttataatgcttcaagtctgtataataacggccttctgttcactgcatatgattttaatggtgttggtagtaaagacaactatcgttcattacgtcaggcagcacagaacccaaaacaaatactatcatctgcgacgggtaatattaagtacaaacaagtgttgaatagttctattggtactatggaacctgtttgccagatcctgctaccgcgaagcctgaacgataacgaagtaaacagccaccgctatcaagatgcaaacgatagtttcttaaccaaagggttgagccgtgttgtttcaaacatggtatggggcgctgtagaatccgtttcaggcggtattatggcagaccgaagagaagcccttgatgttggtactaaagccgctttccagggttctgacaagcgaacaaagatgtattacaatacattcgtgatcgaaagccgtaatgatttgctggaactgattaaaatctactatctgtttactgttctgggatatggtacaacttctggcggtactgctaaagaggttgctgcattggttaaacagtattacggtgttctgggtgctaaaaccgctaacgcaattagcccttccagtaacccagtaacagcgtcagattttgataatagtctgggtaatgacgtggttgatttcatttcaaacgtagaggttattaaatcgcctcctgtctggtttattcgtgatttccagtctggggattccttgcgtttacctcattcaacctttgggccagcaggtattaccagtgttcgctttggtcgttctattgataatattgtaaatacattaagagaatcaccaaataccccgatctcacttgaggtcgaaattcaatttatggaactgatcgatatgcgtcaggattctatttttgatacaaattactaaggagatatgatgttttacaacgtagatgaatttttatcaggtatggctaatcgcgattttcagcgtagcaacctgtttagcgttgtatttgcaaccagccctgcatcacgtatccttgacaacacgatcggtagtattcgagatactttgattgatggatctattagttctatcaacgcaaacaacccgaacgaattcattaatgctatcactggcggtgtgagtaaattgtttagttacaccgtcgataaggcgattatgtcgctgaacaaaacaggatttagcaaaatcatcggggcaattagcccccgtttgattacttccctgtttggtgatagcatgtatggacaactgctatctgaattccgcgatgaaatgatgtataatatgggtttaagcattatgggagttaacctccctggtaaatccattgggtacgaatacgtttataatggtggcgtacctcaaatcagattcactcgccctgagaatggggaattgtcattgacgttccgcaccgattcagaagcccgtaacctgaaaatctttaacgaatggatttccgctattcgcgatgatgtaacaggacaatacgccttcattgatgaagtgacaagtactattcaggttaacttacacgatcgtgatggttcaccgcatacaacatacgtatttcagaagtgcttgcccgtcaaaatcagtaacagtgaattgagctatgagaacaacaacgaaatctggacatttactgttgattttgcctataaaacatcatgggttgttgaggctgataaagaaggctgggaagggttcaaacaatccgtagaggaaggtttagccattgcagcacgtaccgcaattacaggacaataaaggggctacggccccttttgaggatcttatgtttgatattattcgagtaacattaccatcagggatcaaacgattccctatgtttacagttaaagatcagtttaaattaatgctgacccgtattgatatggaaggtcggccccttaaagagcaacaggaaatactggatgaagtgctggatctgctttatcctgggtattccaaaacagaacaggaatacattttcagccgggtgtattgtggttcgttcggtaaaaacgttatcaaggttgtgataggcggtaaaggtgggggccactccgaagccttcatggtgattaatgatattcaactggaaaacgaatacaagctgaatgatgaaatcacattagggtttaacttcccccgtacacgcaatacaagcgaagagttgtttcttgaatgtatcagttatgtaatatacaacgaacagcgctatgaatggacatcactaaccgaagaaacgaaagagaatattcttgatatagtcgaacttgatgatgtcgaaaaaatagttactatgctaacgaaatcggttgatgtgtctatgcgcggtaaatcatttagtggtatgttaaccctgttcaagatcctgtttagtcgcggggatctggatgaatttgtgaagaccaactatctgctaaataaaaacggcctgaacctggaacctatcatgaatagtagcccaatggaaaggcaaatttatactgcattgcttgcagaagacttgaaaaaacaaggtgctgttaaatgagaaagcatgaatataaacacgttgagaaatataatgttgattatcgtcctctgacacatacagagtttacccccaatgcagattttatcaaaggggatgtttacctgtatcaaagagaatatcttttcattctggcacttctggaaagtaaaaatattgatacccgtcaactgttcatcaactgtgaagaatgtcaggaaagaatagaattccagcttaaacgcaatcaaatcatggttgaagatttcgacgataagctatacggcaatgacggaatcgcgctatctgttcaccctcgtaagactggtgatgaagagatccccgatcttatcgattacgtaatgatagacggcgaacagatcatgtggagtgattgtagcgacaaagataaagaaatggtgttggatgcaatcgactatgcaacctataaatcgatttctaccgccctggataagccagcagtggtcgcaaacattccggtaaggtgttcgtgtggacatagccatatcgtctctctgagaggcttacagcaatttttaaaggtggtctaaatgggtgtaaatctgaggttgctatatagcgatatagaacctaacatgcaacgagattggaataatgacgtagcggcttcaaaaggggccgcagcagtaagaaatagtttgattggtatcgtaaccacgatcaagggtacacgtccatttgatagtaactttggttgtgctattagtgatatgctgtttgagaacatgaaccctctgacagcggaatcaattagaacttctatcgtatctgcgatccggacatatgagcctagagtatataatctttctgttgaagttattccacagtatgatgataactcagtaacagtaaccatctattacagcatcattgatgacccggatgacgtagagcaaatcaaactacagctttccgcatcataacaaaaagccccttcctttcggttggggctttctcttagaattcaatgaatcccattagtgtttgatatcgcaattcaaacggggagatataactttgcatctggttttgatcggatacgatgtaataatacacctcatcattatcatcgtatagtgcttctttgatgatgcaatatcgatcggtttccacgttcacataaagagtatccatgtactttgtaactttggaaccctgtgaactgatctcgtgaatagcgttatctatgaacagtgacaatgcttgcatgaagttatcaaactcaccatattcacagcccataatagaaattgcagtgtattggtgccagcctttgattgtatctccacggcggatccatccgatttgtctacccccgatagatacacaccacactttaccaatagggctatagaaccgcacaacttcttttaataacagggacatgaccccgcattttgtataaggattcattttaacctcatttcatatcaagtagccatgaagggctagtttcaagagaaatcgcagtatattcgtattttacagtataacctttgaaaccgaaaggaataattgcattttcattgagatattttactttatgctttgcttcttcttcattcagagcagcacagactgttgtttgttcaacgttaccagcaggagaagtaaatttttcaatgatgatatatacgcagttcatcctattgtcctctttccattttttcaagtttcatcgtatccacttgcagttgaagtttaagaatacaacctttcgatatgttatacaagtagtcactaacgatttttgactttacctgatcgtaatcagaagataacgtaatccaatcatacatcgtttggtatgatggaagatacgtacattgttcttcttttgataacgctttaaatgattggtaatcggttggaggttccgaagcaattgcggttgtggtcataagactaagtgcaagtagtagatatttcataatgtattcctcattgttttcgatagaaccaatatagcaaaaagccccgaccgaagtcaagggctttttcattaatgcaagaaagatttcacgtactgttcgatcttttcacgacatgtatcaactgaggtgctttccgcaattacggcatgacataacgcctcgcctccgacccagaaactcatcatgtactgaatatcacgaccttccatttctttttgatgcgctttgattcgatcgaaagcgttttcgattgtttcagtagcagtaagcatttcggattccccgtcaacctccgccagttccccatcgatcatttcgctttcgacttcttcccagtatactatcgttatcatgcattaccccagtggttaaccgtcgtaatccccgccacaattcacatcgccttcaatgaacagttcgcggttatcacgtaataaattatactttctttcgagttcaggcccgaacgcgtcggcgtcttcataccagctataattgtatcttccgcattcatcatcatattctggttcatcgccgcgttcattgaagtgaacaattttgatatcgtccatccccagttctttcaacttatcccagatatacgaaatctcaacgctatgggaaccgaacgcttccagtgagatcgtaccgttgctatcgacttgaggaataccccacttcgaacgagtatcatcggtgatcatatctattaatgactcaatattattctcaccgtagatatcagcaacttccttttctttaccagggcgaacaagtccgatcccgataataaagctactgcttgagctattgctcacaaacccagaacgaattttcatcgcatcaccatattaccaatcatgaatagagggattagcgcaaagacgataccccatagaatgaccttatcttcacgacggtcacacccatgatagataacacctccagcgaaaatcaatacaacaactgaaacgaacgcgaataaagaaatcatttgcgggtatccattctcatagaaacttctttcaggatcttattcagatcgtgaagcgcatcttttacgttaccttcattataggtaagcatatcctggtacagccctttcaagcaacgattgataacatatgctttttcggaaggtaacattgtcccagaacgattataatctctgaaaatgtccatcatcgtgccgttgttgccaggtaatgacgggttgaagttaaccataccggacatcaaactatcaacatacacaacggttgtgttatcagaacgatacgcgccaccaactttaaaccagttgctgaacacatacggagattcccgcacttcgctcaaatcggttccgatttcatcgatgtttacacgaatgttgttaaaatacaccgattcatcaatagaaccaggacgccatacgatagcaccgttgttatttttgaatccgactacatcaacctgccagccgttatctgttaaccggacatcatcaacgacgatgaaatcaggtagctgtgaatgaaagccgatgttttcaggacgggaattacgaaacccatcacgattggagaaataaaggatgtcaccttgattcagttcgcatatattcataagatttttaaagtccaattcaagtaattccacaagtcacctcaaagccccctttcgggggcgagatctcattagagtttaacttctttttcttccagaacgattgtgcaatcaaatttcacatctttccagaattccgctgcaacgatatctgttgcggtaacgcttacgctggtttcttcaaaatccagatccgcaaaccatgcgtgtccgacgacaataccgtacattacacgactcaggcgattattaagggcgcgaacctctttaatagtttcctttgtctgcttatcaagatactcgatcaggtcattcttgtcaagcgcttcgatctctttagatacagtatcataagcccacagaatgatcaggtcgccattgttgagtttcttcttaccttcggcgcgttttgcaacggtagcagcaacagccggaagtgatgaaacgcctttgattttcacgttcagttctttcgacatgtaaacatcagtcgattctgtgcgctcaaccttcggagaaaagccgtaatcacggatcccttgctcagacaaccattcaccagccgcctcaccaaagcgctgtttaagcccttctgcgttgcgtaaaccaatcgcgttatcacggaagaacttcattaccttctgacggcctttcaggatttccagacggacgttatcagcaacaaattccttaccagaaataccgcgagtcatcgaacggttaaccagaggcagagaggtaaagtcaaccagtacagacatacggtcttcaccaattttagccagcggtttgatagtcagaccagaagcacgtaagtttttcagagtcgggatatcggtttccagcggaagtaccttaacgttaacgataccatctttaacaatggtaaagttacgcacttgtttggtttctactttttccggcaatccaaactctttttgtttgctttccggaatggttacgtaaccttgtagatccgtattgatagaaatgttcggacgggaactgttaccaaccaggtgtttcactgcaactttcgttgtggtttgggtaaattccggtttccatacttcatgcgctaccagttgcgccgccagtgctttacgttcttccggagtagaagcgtttgcaatctgttctgacagtttatccagtgtatcatcatctttctggacagtctgacggcctgtacgattgtacgcccagtgttcagaagacaggtcgatcactgtgtcggtttctgccagcagttcgagagcatcaaccagagtaaacgcgttttcatcaggaaccatgttgtaatcaacaccatccatcagacgtttagccggatcaacaaccgcttcggagatcatatctttagcgttggaataatcctgtttggtaaagcagttatcgtatgctttaatcagacgcacatcacccagctttttcagaactttccatgccagatctggattcatggtatgaagcgcatgatacagaaccacatacagaacctgttcaccttctgctgttgccggatcgaagccgtcaacgtcattgatcgcgttttcacccagcgcccaaatgtttttgatatgttccggaaccagaacaacaccatttgcagcattcaggacatacacacggccttcatccaggtagatcgcatgagttgcatcgccaactttgacttcaacacgtgcggaggtttgcgcggtaatgatttcatcaaatgcaggtacatacgcatcaaacccttcaacgaatttgtgtaatgcgttggttgcttccgccattttttccagcagaggacggtttacataataaccatattccaggaaagcaatgttgttaaacgtcaacggcagagtagaacacgctttcaggatgtcatcagtacgccagcagttatcataaccatcagtcaggaagatcagactgttcagattgccattatccgcttgcagatcggtagcgagttcaaccgccagttgcagaggttcaacgaagccagtacatccggtcggacgcagataacgatcgatagcatcattgattttgctcaggtcggatacagagctaaccttttcgcccacgaatacagaaccgaactgaccacggctggagaaatacagaatagatacggtatcatcctgcttaaccagcgttgccaggttgtttttcaggtgctgacgaatgcgcgggagttcgttatacatcgatccggatacgtcacaaacaaaaacgtggttagtcggggttggtttggctacggcgtttttgaattcaatgttagtgatcataattttctcatttataggtaaattttattaaaatttcgtttacttttttgctaatagtatctaatgcatcatcgcatccaaacttactactcaacaatgaaacaaaatcatccatcgttgttgtttgagactcgccaacgtcaaaagacagagcgtaggcaacaggatttttaatccttacgatttgaatagtatactcattcagatcgaaccgttcaagatattttcgcaaagaaaataaatcaatcggtactggtagagtttgactaaacgttatttcttcccccagttgataggggggcatttttacacagatttcgtattccatcagtgatgactcttcatagtgtgttccagattacggaaaatttgcccgtgttcaagctgtgattggaattctccgcattcatcagacataaatgaatacaccgttctgattgccaaatttagcgttgtactcttcatacaaccacatcttgatcagagcgtctttctcttctttttccagatcataccagtcacgcccatcataagcaagcgcaatttgaggattagaccgatatcgagtttctgcgctatcttcggtttcccattcataacgcttatcatcatagtatgattcgaaaccatcacccatatgaccacccaggtcgcggtgtacttgctgtacaacttcttccgctgtcgggcaagtcatccagctataaccacagttaggaacacaatcacccatcatttcgcggagattgttgatatcagtcggatccttcgggaaccgtacaataaagctacttgatgaactattgctcacaaaaccagaacggattttcatttgatttcctcaaattcaaaagcggtgaaatgttttctttcgtcatacccaacagtacaacgatgcgtttgctttccggtaaacccgtcaaacacagttacacaatagtaatgcaacgacggaagcggtgtatgtttaatgtatttgatcgcgacgttcaggtcaacagtagaacatacacaatcagacgtttgctcaaaacggtcatcaaaaatcaactcaatgctatagatgttcatctttcacttccttcatgtttttcataacctcttcaaaagttacggggatttcgttgtactgtagtgattcatcatcccatacatcgcgatgcccgaatgttgaactttttgcaatgattttttcattttcccatacatcaatagtaacatgatcaccaagataagggaaattaggaactttgttcagcgcatcaacgcagttttgcaatgattcagaaacatgggcaatttcagtgaattcataatcagcactataagaagctacgtaaatcatcaccaccccctaacgatgctaaccagcagtaaacccaggatccagaacacagcaaccgcacaaatacgggccattactacatttccgcgactagtccactccgcactaagaaacaagaggacaaaagttaacgcgtataaaaccatttcaataacttcggtaatcatataaacctcactgaacataacgattgtagttgatgtgccacatgagactagacacaacatcggaaacaatcaaaaggaacaaaccagcaatcattatcaaaaggataactaaccaagtggttccgatattttgttttaacgacaatagcaaacacataatactgacaaaagcaaggaaagaaataacaagcatcacgattgaaggggccataatataaacctcacgaaaaagccccaaaaggggcttgattaatcaatgtccgaacacaccacgaatagactctgcgaatgcatacagttcaggatttttagcttttactgtttcgatttgctccagaatgtaatctggcttgtatttcgcaccgaaccagcagtaagagaaagagcgatcccacatgaacacgttatagtattcaccgttacgaacttcaaccatcacataaccaggattagaacccagcgggtaatctttcagaagattgaatttcgcgccagcaccagtacatccgttaaacaggtcattaaaagtcatggtatgttccttttgtcagtttcgtttcaacaaggtcactatactattcttcgttagcctatgcaagcgcttttttgatttgttttgcaattgcttcgatcaccggaacagatacagagttaccagcttgtttgtacgcctgtgttttgctcttatgcatcttgaatgaatccggaaatccttgcaaccggaaacactcgcgaggtgataacattcgagggttcttaccttcctgtaataccagacattgaacaccatccttatagtattgggctgttatcgtcccagtacacacagaatcaactgtaacggcctgatagccaaaccccttgccgtttgccttgtttcgctctttacgctctctaaagcccttccaggcacgatctgatatggtgtattgatcattatccggttcgagaatgtcaccgacccttgttggggtacgtggaggaactggaaaactaaagaacaccggatcgcgaaagcagacaataaaaacacgctctcttcgttgaggcaatccaaaatcttttgtattcattacctgataatgaatatcgtatccttcgtcctgtaacagcctgtagatggttttaaacgtgtttcccttgtcatgtgttaatagctggggaacattctcaaagaacagcacagagggctttttagcccgtataatgcggagtatttcaaagatgatagtaccgcgaggatctaacatgccctgttttaaccctgctttactgaacgcctgacaaggaaaccccgccaacaggatatcgtgatcaggtacgtcgttttcatcaatggcgaatatatcaccctgaatattttcatcaccccagttatcagcatatgtttgttgtgcatgtttatcgatttcagacgttaaaaggcattcgaccccgccgaatgccttatcgaaaccgagcctcacgccaccaacaccagcgcaaaggtcaattattttcatacgtcgaaatcaacctcatcgattttgtatgattcttcgccaatatcagcccatagctgaatattcacactttttgcatcacgataaagagattgaccacaaagcccacctgtataacaagtttctgtaatctcgttaacttccaggcggaggctattgcgcataattttaacaacagccttttccattgccgaatctagggttttagtatcaccaaatactacatctttaacgttcaaaataacatcactcattatcgccactccgtttcaattccgtgtttgtatgcgtcaacgcccagaggggtgatcactaaacacatatcagtatttttcgttggtgaactaaacgccatagatgcgtagcctttttgaatcagggcatcacgccctgatttactgggtacatcgttgaaatctaaatccaacattttcgacgagtatccgtaaagtttacacagaacatcaatttcagcgccggacaatttcggatatgtcatttgtagtacctcacaacatgttcagaatacacacgttcaatgaaatcattccagaaatcgcgatcaacttctttcggataaccagatacagccgccagcttttcaacttcacacatcgttgattctagcgcctcttgtacggttgcgaaaggaacaccgccagctttaaccattttcaaaaatgcactatccggaagaggatatacaatatcaccttctttgaaaatctggatcaattgcataccaccgcgcaacgcatgagaaagagctttccagtcgatcccgttgttggcttctgcttgccgtgctcgttccccgtattcatcccagagtttatacacggattttttcatttccgctacggtgatcgtagactggaatttacgccccagaacttcataaaattcctgacaacctgatttcagtgttttgtctgtaacgaatcgacaaaactcgttggtcgggaatcggttagaaatctcaccaactttgatgcgcttgccgtaattagattcatccacgttacccagcaatgatgtaccataccagtaatcgggaatcatttgtaacacatcaacaacttcacgcagtgccgccaggcgagaacctttaacaccatacttcgccgcttgcttacgaacataaccaaacaggccagttaattccgtagtgtagaagcgcgaacggttagcgcggagatattgccagatatcagagttagcgatcagcttgctatcatctgcatgaagcatatcaatcgctacggtatcaccatcacatgcgaggctaataaacttttgcagactgtaaatctgacgatctacgtcattaacatcgttctttgagtttttatcaccagttgatgtatcgatagacttcttcgcagtgcctaacaggatttcgcgaggatgagggagatagatccctttgtagtctttatcgcttgttggtgtttccagtccgtacaggtgagaaccgaatacggtttccataatcattttcatcagaattcaacctttaatgtttttgcgatcccgcgcaattcagcggtagtaatatccggaatgtttgttccgtagctattcccaaatacttttttaatcttatcacacaaatcgcggcgatacaccatttctttgtattcttcttcgctacgatacagttgataacccatccacccctcagcccatccggaattgcgcttgattttaatattagtacaacaatcagacccatcttccggtcggaaagatgcatacaggtactgacgcgcaactttttgtacgtaaagggttttggggttgcgattttgtcgctggtcactacggatcccagcatcatacaacgtatcaccaactttcacatcaattaaatcaatcatttacgtctccagcaattagttttttcacagtaatgaacgggaacagacactcccaatgtttctttactgcttctgttgtatgttatcacaatgaatcgattttcgccacccttaacacactccagatccaaaatctcgcgggttcccttcgtgttcatgtctgcaacatagtattcttcgttgttgacaatcactatatccgacataatcaagcgaggtttcatgctgcatacacctctgattcatcaatccattccagattctgattgagtgattcaatcagttttttatcgcgtcgggaaataacaacggtagaacctttttctgccttcacgatgatatcaccagaagaggtaatgtattcaaccacataatcacggcgagggcttccgagtttatcaccaactttaacagcacgtctaaccgattcatgagatttttcggtgaacactaattcatcacctacgtgggtaacaataccatcaacagcagaacgagaattaacataaattttgctaatctccgccatgaaaacactatctctcagatatcgagcagtcactttatctaaacactgagaagatactttatctccgccaggatatactgagataatcattacatgaccctgaacacgggcggttcctactttatgcagaatgtaaaccattgaaccatcagaatctttagatacaaggatcacgctgaaagattctttgtgttgcttctgagtttctccacaggtaaaactcacgtccagaaaatcaccaactttaacagcacggggttttgctacttgttcacgagcactaataacagggatcataatcatttcctcacagtttcaaattcttcatcagatttccaatatacgttaaaattacgacaatcgtgttcggatgtcaacgtgtatttttcatttgttttttcgtcagtgataaccatagtttcattctcgatcgagttaacaccgtaaacgaaaacattctcaccacgtttgtttaaaaacgcatcacccttttcaatcaactgccaacaggtaacaggcaaaccacccggactaaccgggcgggtaacaagacaatagggatgtttaatcatttaaattcttccattgcataggaagtaagatctttgaaataccttgcggtgttgccttctgggttgtttgtaatctccatcaggataacagcactatcaactcctgctttcttagccatgaatgaaagggcttcggtagcaataatcgttgctttcataacatcagctttagaaacgttgattgtattcatttttcttccttttcattaatcacttggtatgtgtgtataatacaaaagccctcacgagaacgcaagggcttttttattaaattttgtataaatctggattcacaataaccgcacataaaagatcatctatatgtgcggcttcttgttctaaggtttgcttagatgaatgtgctttcaagcaacccccgtaaaggcgtttactatctggaaatgatcatcgaagaattccccttgtcgttgtacgacctcatgcataggtagccagaacgcgtctgctgcatcatcagcaccgcccatgatacgaggcaatgaaccatcgttattaggttcgagcttgatatactgtgctacagtcggttttgagaagtacaccgaacgtttcggatgatcgaacagcatcgaattacggatagaaccacgaataaccttttcaggtactttaattcgtacttcttccagcaattcacggatcgcgcaatcaaggaacgtttcattaccgtttttgtgtccacccggaagcgccaacgcatctttaccaggcgcaaacttacgacgaattactaacacgttgttattacatacgaccactgaatcagccgtgcaacagttcagagaatccggatacggatattttttgaacttgtcaatctctcgttgccagtgtgcatcttcatgggacaaacgctggaattcttttgtttgtgtccattcatcgataaaggaaaccgtagtgctaggcgcatattttaacaaatcttcgtcccagccttcatgatgttcccagataattttgcgtaaattggtcgaggacagatcctgatctccaaccttcacaggttcaaccggaatatgattccatccgaatgctttaagccagtaagaatctttgtctttttcgtacccgacgatcgcaattcgatcatttcgagtttcatcgattgccatacgaacacgggatttccatttttcctcgttatagaggtaatccggaatgtacgcgaatttgattctggctgcatcttcaacatcaagtttgcagatagaccagcgagtgatcattgcttgacgctgtttagcggtcaatgggtttaatgtgttcggatatgcataagcagaaccgatcagaatgtaaaccgtatcagcaacagcaagggcttcccttaccattttctcatgaccatagtgaaaaggttgaaaacgtccaattactacagctttatcatatttgtgtttcataacgtgctccacgtttaaaggttaatcataaaacagacgcaattatcaacacaccaaacaatccaccaacgaaaccaaagaatagtgaaatgagtatagtcagtacgatctgttttatgttcattatagtattctcgttttagatgtcaagcccccaaagagggggctttaaaacattatttacgagaatcgaaaatcactttaccagcataatccgaacccattacagtttgaggtacgccacctttatagcgggtagagtagttcatctgtacatccagttctttccagcggatcatttccggtgtaatggtgcgttgcagggcggcgttggcttctgcttctttcttcgctgcatacagacgggcatcagcatcacgttcgttagcgattgcagcgttttcacgcgcctgacgatcggcttccgcttgttttactgcttgtaatgaagtctgttctactttttgtagttcagctttagcagcgttaacctgttcttcgcggatcttcgtgttagttacctgttccatgataacttccggtagggtgatatcctgcaagaatacctgtttcacagtgtaaccgtaaggccgtgcataatcttctacttcctgctgaatcgcaatttgcagttggttttggatcttcgcatcaaacaggtcttgcgcttttggtacggatttaccaaattcgcgaacagtggaaagcagtttttcggttacatacttatccagtgcctgatcctgattacccgcgttgatacggttgatcggtgctttgctaccgtcgaattgcagcattacggtcatatccacagtggatttaaatttatcctgggacggaacctgtaatttgtcgaacttcatcgcgatgtctttggtactgaacgtatcaaacgttgccagcgggtttacaatgtggaaaccgggcagtacgggtttcggtgatactttacccatgaaggtttcagttttaaccgtaccgtcttgcacaatggtatacatgttaggcactaaccacagtgctgcgactacgcccagagcgatcagagaggttttcttcgggttgttcacgatagtgtttaagttcatcataatttccataagttgttgttcaattcgatagttattctatcatcacatttcacgctgtcaaactatttttaagaaagttttgtcagcttgtagattgtttgatagcacaagcccttaatctcgtccaggatgttcttcaaagaactatctactgattcgtagatctcgtttgcttcgttggctattttacggagatacgccaccgtgtcaagcacattttcggtttttagcacaggtttgtatcttcccgtgattcctatgtggatttcggtgaatttatcaaccaaatcctgcatatcttcgtaaaaaccctcatatgctttatgttgtgagtatgaacctgttgcaaaatgtgcgctatgcatataggtaacggacataaggcacatgccaataaaggcatctatcttgcttgagttctcagattctgtaatttgtttaaatgattgcatgatgatccctttatgaacgatggatacttgcaaactcatacgcgaccctaatccctagctttgcgcattcggattcagatcggcattgtttttggtgccattttcgttccatgtagttgtagaatagttcgcttgtatttacgctgggagggatcgttgtgatgtatacttgaagggccgcattgatataatcgtcaaattctttctgaaccggacggtcggcggcgtgtgttgtgggtgtcatcatcaacaatccgaacagcacagccattgatatgcgtttaatgttcataacaattactcttttactcatagacccactataggtctactcctgtatatatttatagcaaaaacgaggccgaagcctcgttataatatttttgctgtaaagtcaatcaagtaatttcataccaacacaaacttctttcgaaagcgcgtattttgttcacgttttctacgttttcgtcccaaccaatcaccccagctttcatacgtttcagttcctgacgtaaacgggtacgtacttttgaatcaattttctttactgcaatagaaagcattgcattcagatcgccatgagctttgttaccgtcgcgacacagattattatcaaatcgaatgtatgcacatcctgatttgtgtttccagttggttgagtaccaacgcaacccatccggatcaatgccatgttgagcataataacgagaatactcttttacttcttcgatcttttcgttagatgaacggtcacgaagaggattgtatttcttacggtaagtgcgactcataatgatctccttttgttttatgcttccactgtatcagggttgttctttagttgcaagtaatgttttcgacaaagtgaaacatatttgtcttcggccccgatctcaatctggtcgccgttagcaacaaatttgccatttgcatcaatacgggcaacggtagttgctttctttccacaatgacaaaccccccgcaactccctgatctcatcagcaagcgccagcaacatataagaaccttcaaacaagttcaactgaaaatcggttcttaatccatatgtcattacgggtatatctaattcgtcaactacccgacacagatccatgacatttttcctggaaaggaattgcgcttcatccacaaacacgcaagaaaccagtttctcgctgtcgctataaaaatgattgttgtgaacatcataatataagtccatatcaggtgtgatcatggtacatgttgcttccaacccaatacgcgaagagatactctgtttaccttctcgcgtatcaattgctggtttgtacatcaggatccgcataccgcgttcctggtagttgtatgcatcggtgagtaaacgagcactcttgccagcattcattgatgcataatgaaaatatagtttagccatttatcctctcaacaaaatctggggtattttggaatttcccttccccttcatggtttttgcatgttttatttgaacagtagatccaccaatcccactcatcataagggggtttggtaatgttcattacacaaattaaagggaaatgacaatcccgacagcgaacattttctataatgtttgcgttagccatgtgtataaccgcccatttcgctatcttgtgcttgatggatatcaagataccacatattgattttgcttttcagttcgtccatttccttactcagacaattgtcaacgatacatagaacattaacagtttctttacgctgcataatgttgatgttattcgctttcatcgcttgcgccaatgcattacaggttttaaccagtgcggcgcgttgtcctttgattacggcgatccgtttgttcgctttcttaatctcccgacctgctttgataggatccatcatgattaattcgccttacgaggatcgaaatgaacgacaatgatcgggtaatcaccagtcacctcattaataatgcgcttaatgagttcccagtcgcccccagcgaggccagcaccgattaaaggtgtgatgataggctttccagtcttaacggcgtcagcaagccctacagcctgtttaaacgcattaccgattgcatcataatcgacacgcggcccaggtgtccagaaatcatattgggtgtatgcattgaaaacaatattgcctttttcgccaatgtaaacagaacaagttccgagcttatcacgggaaccttttaacgtattggcatcaacttgaaatgcaccaggaatacgatcgcggatttcgcgagcaataccagcgcccatattgcaatagcagttgcatccgtggatcaaatggccttcaccattcagatacatattgacagcattacctttcacttctttaatgatcatttttatttttccgatatagtagggccacaacaaggcccatcaaaatcacaaggatccacaatacagtgaattgaacccctacgctcattttctcgctttccgttcacggcggcgatcttcttgatgacacatatataaaacaccaccaaaaattataaaaccgataacaacgcctataaagtatccagcactaaacatagtcatcatccccgcaatagtaacaaggcccagtactctcatgtttaccagcattgtacgccaggaaaactacaaccgctgccataataataaaaatccagatagccattagtaaagccctataccagcattgaattcatcaaccaaataagtgcggaacttttcacaccgttccttatttggcgcttgtttgcatagattcatcattggttcggactgcaaaaactctttttgtttcagcaacttaccgcgtttatacaggtgagcgttttcctctccccacatataagcaacatctaactgttctgcgatcacttgcttacatactgcgacatctttgatatcgcgattgttgcataactcatccaggcgagcatcacccgcgtgagcaaatccagcaaccagagttaaaagcagtgctaactttttcatgatgattccttattcatcctcttcgataggggtataataatgcgcattgcagatatacgcaagaacttttttcagagacatatccgagaacgtcggatcctgatttcgtctcatcccactaccagtttcaacagcccaacgtttgttagctggattgtatgtcagccagtaacaatcccattcagacagagtatgttcgaacagatcgaaacgcttacgcccgtttgcttgcggcctgacaaaaggttcaaccatttctaaagcggttaaaactcgattgatgtttgaaccgtcttcatccatcgcgatccgcaaacagtattggttaatgtccggatccataccatcgatacccagaccgatagattcgaaaaattttgttgccgcgtgataagacacactggaagaacgatattccaacatcacggggatcttttccccgtccttgacgttgttaatgatatcctgatcgatgagttcaatcaggtctcttttctctttaatcaacgtggaaatttcttcttgcagtggggctatctgtgcatgaagttcttttatccgttgatcaattacggtcacttcgaacgctaagtttctcattgtacccattccccgtttttgtcaatgtacatgatccaatcagcaaccgcccaatgggaagtattgcctttcggagtcgccacgatgtaggaaccagctttaaacagtacgcgtttagtttcgttcaggatcaggtcgctcataatgtattcctcatttaaccaaagtgaatcgtgattcataagcatcgttcgggcgctcatacacagtatccgaacttgtaatgacagtgtacacggtttctttcacaagatccatgattttctgtgattctccccagacattgatactaaaatacatcccatttttaggaataggattgtattccatatcataatacatatccatgagttcacaaatgaacaggcggcgctgttcgttatcatatgtgaaataaatgttaaaacaatcgagagatttactcaaagtaatctctttgataacgatgttgtcttgtttgctaaaatgttcgcggattgcttgcacacaacgcaacaggttagggtaatcatatttttgtgaaacaatgacttgatgtgaaacgctcataatgtattcctctcaattagatgcactcataataaaaaagcccccgaccgaagtcaagggctttttgtcaaatgatttgtttttcttctaacagcttcgcggttgtattaaccatacgagcataatcacgggcttctttctttgtatacttgaaaccagcgttatagctcgccagcgcctttttcaagtcgcctttgtggtaatcaagccagtactccagttcatagatcgcatacttcgatccaccttgaagagtttcgagctttttgattactacgcgtttaggatatgacttatccattcgtgcgctggcgctacttgcggtaacttgccagcatccataagcgtgatggccttttttacctttaccgacattctcacatgcgcgagactcgatccaggcaatagccgctaaatgatagcctaaacgtttagccttatctttttctacaggttttgcagtcttcaaatcatagttgtgtccaactcgataagcatactccaaaacctctttctgcttcggtgtaatgttatccaaatccttgatgtaggatggagaatttttgtttgccggaggctttacagtagccttttgtaaaggcaattgatgagtaggcaaatccgcaatgaaatcccctagcggatccgtcgcagcgttgccagaaaaagagcacaagaaaatgctggcagcaataataattttcttcattttaatacctatgttgcaaaaagaggggcaataatacaccccactttatatttatgcaactattttagatagttttcgcgtcacgtagtttatcggcgataaactcagcaatgttataatttgaaatagccttgttaggatcgtatagtgcaatgatttcatctaacgatacaataacggcatgtttaaagtagacgctccagctagtagtaaggatttcgctgtgatcaaatccacaatcagggctgaacaaagcgcggtatttgtatccactgtatctcgtcagacgattcgtgctgtgcgcatcactggtgatcagaaaagtcccctggtgagtttcaacaacgaaaaagtatccgaggcgttctttgttgtccagcatcttttcaaacttgcgatcggtttcttcgcgaacaatacgagaagtcagcatttccaacactttatcgtattcgggccaatcattctcgatcacgattgcatcaaacggtttcttaccattaatcccgcgtccgatttcgattttcgtgcaaatttcgttgaacgttttcaaatcttctggtgtcagttctttaagatcgctcaattttgctacataataacgtttttctagtttcattttacaacaacctcatttttacaatatacacattcaataaaattgatctttctcatgttgaagaaatatgaaccctccgaagatttttccttgtgttttacatcttccgcgtcatatttcatggtagtatcgcaacagttgcaagtaacaatacgggattttgcatttatgatctcgatcatgatatacctcaactcaaaaatagtttcactgagttaccacatttaggacatatgataaattttttcacaacataatcagcagcagagaaaaatccattgtaaatcgcttctctcttttgctgtatatcagatagttcatattctaacccacttttacaacaactgcaaacagtaattagttttgggctatggatgacagtaatcatatacacctcacaaaaaagggggctttcgcccccatcattagaaattgtcttcgacaaacgccgcgagacgggaacgatacactgtatcaagaatgatatggcttgagtgttcgtattctttcagcttttcaacagcccatacaaacccgttgtttacggcagtgtttcgagggttgtcgatctgcttaatgttcccgcatagtatcagaagtgtgttctctccgcaacgagaaatgatagatttaatttcgtggttgctaaggttttgacattcatcaacaatcagcacagaacctttgcccggatccggatgtccgatactgcgaccacggaagtaatacaggctagggaattgcacaacccctttttcaatcaaaccttcaatgtatttttcagattccggattatccttaaacagaatgttcaggctagtaatacaaggttcgatagaaggccggagtttttcgcccaatgtaccaggaaggaagccgatttcacttgataacgggctatctgacttcacatacatcaagttagcgtaatgtccactattaaccaggtgcatagcaccggaaacagcaagcattgttttaccagaaccagcgcctcccataatggtagcaacatcgatttcattgctcataatggattcgacaaaagccgcttgcagagaatcacggggctggatagctttcatgagtttgcgtttcatagcctgttcgtgcttaacaggtaagacattcaagcaaatctcatcagcagtcaccacacgcccgactaactcaccatttgaggtaatgtactggttaggataaaaatcttcgtcaggaagcgaactgtaagtgatttgggctacattatccgtatatcccaacacttccacggtatcccagaaatcagggatctctacgtaaccggaatacaacacatcgctatcttttaacgtatcgtcgccagtatactgttctaccttacacccacgggacattgcgatcagcaacatcataatatcgcgagtaactaaggttgcatcctgctgcatacaagtttcaatgattcgttcgtcttgcttgtcaagagcaaacgttttgtttccgacataatcaaccactttaagggtgatagtgtcagacagtgctgggtttgtcaggtttaaaggaatacctgatttcgtaatcgcatcatatgactgaccgaaaataacttttgacagaagccggatcgccaatcgtgcttcgtgcgctgttcgttctttcgttttcaggtgatctaattcacccatagtagcagaggtaataatgatttctgtaccaggttgagtgaatgaatagattgaataggggttcgagactaaaacgttagtgtctaaaacatatttcatagaaaattcctgatttgattacggggtacgcggattcgcaccccgcgtactgcaatcacatacccagcgaaattacgtgaatatatgctaatggatgtttcttttgtacacaatgcatgagtgtattatacacaatgtccatgcgttcattgcgcgtaagatcacactcatcaaaaataaggtttattgcctggtgctctattcgacgtccacggaaatgattaagaattgcccctttactggtcaatacatcacatccggtagcaccatttagctgtttggcgtcttgtgctgcatttaacgtatgcgctacgtaaatgttaagggaactatgggaacgtttcataaaatcaaacgcgcctttagtcttttgcgtttctctgcccagatccagcctggtttcgaataccataaaatcgttagggccgtaattatgcgttggttcttccaactctcgcataagatgcatcttacgacattcttcaattgtctttacataaaattcactattcatgttttacctttaaggggccaaagcccctttgttacgctaattccacatgcggggcatcaatgaattttgtttcgatcggaaggttcggatcatttttccagttgataccaaaacgcagtttaacacccagttcatcacctgcttgtttaacagcattcaggacaggcaaccacactttagggtttgtttgccagccttgaggcaacacgctaggatacagatccacagcatcacccgtgatgtgttttgagttcattgtttgagatacacccttacggacgttctcgcgctgttgttctacagtacgcagaccttcacgtacaccaaaatcaacaggagacagttgcagagcgcgttctacaactttcaccagttgaggtttaacacctttaaggttgttaaggcttttttgactgaatttaaacataaatcacctcttgtaaaaataccctgtttgggtacacagggtatttatggtttaagaggttcgatacttaataatcgtaaagatcaccgaaacattcttcatattcgcgtttacgtttaatttgctcgtttctgcgctctttcatatcgggaggaagacggttttcattgacttcatcaatgtaagcctgtgcatcctcttttgttagaaagaatgcatggaaattgtacccgttgtacccgttcatactacgatcttcaagagagaattctgtgtgacaatcccagtctttgtacagggtaatacatttagcaaacagcccaataccgcgatgaatgtatgggaatccagtaacaatcatcttgctacccatttccgcattttctccgttcacacagaatacttcatacatgatcgcgcctggtttaacatctttcttaacagcacgtttttcaaaagcacttttcataatatattcctctcaattggtgtaactacagattactagtttagtttctgaatgtcaacaaggtttatcgttttttgacggaaaagttagagtgaacaaacgatcatgaaggttgtcgatccgttcacaagcctgtttcagtatggttttatcaccatcatttgttgtttcaatgcatccaagttcatcggcgtcaatgttcactacatcgctcatcaatgaagcaaacacgttagcatcaggatgtaacagttcttcgatttcggccttcatgccgtcgtgttcagaaaggatatcaataatatcgcgggttaaatctccctggtacgggaaccctgtttctaaatgattaatgatcctttgtgctttcgtaatcataattttacctacaaaaaagcccctttcggggctagttaattagagttcacagcaacggcacacaccgtattttgtaaatggagcatcaccgctaacgtaggcccagaaatcacatgcttcttcggcagtatcgaagattgcagcatcatagaacccgtgggcttcgttaccgttctcatcgatgaaaaccggagtccagatattaggattgaagcaatcgtcaacaacaacccaaccttctttagctttcattgcttctttgttggcttcgatgtgagctaagatttcgttcatgatgtccatttttctctcctaaagtgtgtttcgtttcgacatggctatagtctcataaccccgtatctacgtcaacacttatttgaagcgaattgtgctatttttgaaaaatagtccagagcacacagcaccttcaattttcacccctgtagggcttttagcaacgaaccctgttgcgtaggtgtctttctcatcacatgcgaaccagtcgtggcctgtgtacgtgatatcgctaaacccgttagcagtcagaatacgttcggcttctttctcatcggtgcatccggattgtgctaaaacgacaataacgactaacaccaaagcaataatatatttcatgttaaactctttttaagttggttttactggcttcaatccagtacacgggatcagaatagttaccgcacatacccagtaacacagttgtacatcctaaatgatcggaaggtctcaatccatcaggatgaaaaggcaattcgttaacaccgatactggtagcaaaaagagcacctccagtactgtaaaatgttttgatatgatcgtatgcatcatcaggccactgaaaacgataagttttattgtcaatggttactgtatacatatcatattccgtaaacaacggatcttttccttgtgttgccccatacagagcaccgcgccactcaaccagatttgcttcaatgtcgcttacacaaatttcgttacccatacgcaaatcatgaaggatcccttcaatggtacgaatagccccgctaagttcattagttaacatatagtttccttttaaagtctttccagcatatcaggcccgaatgccataacaaaagaacccctcaacgcttgccactttttatggaggcgcttaggtacgtttacttgcaaacgatccattttacgaataagttctaatgcattgttgcttgtgatttcattgtaacctggatttattgttgcgatcccatatctaaacgccattccagcttcggtatttccaacaaaaacagaggctttcatttcatcaaaagattgttcaaacatgagatcagttcctttaaattggtttaatggttttcaggtgtagtttagcataagaagaaccaaatgagttaccattatgatcaaacttatgttcttcactcttccagtatttccccgatttcatcaagggtatacgcttcttacctgctgttatcgtttcaaccattccggtatgagtgaatgtcatgatataccctcttctttcagcacttcccagatcagcttatcaaggtgcatcaggttccacataacagagtcatacgaacccagcgagcgggagtaaatcactccccatgaacgatagcttttctggaatccttctgcactatctgtatcatacggcatatcatcaccggacgcaatcaaaagtttaaggatcatcagactgttcagaagttttgaactagcgtcttgtgcttgtacttttgcacaataattttcaataatcgcttttgcctttggttcggtgatgcgtccatttttgcatcgctctttgtacacatacataagttcatcgattatttcttgcatacattatttccttctgttctgtgctcatgccatacaactgagagcgtatacggtcttgtatacgacgcgtttcgttttgcatcagttggtttgaaagaatcaaatcgaccaccgcgccgcgaactttccatagataatcaatcatcgccatatcttcatcagtatggaaacccttcgcatcacattcatagataatgctttgcctttccgccattgccatttctgctgtcgccggagtagccagagaatattcatacttctcgatcaatgattccagtgtacgtggttttacgggaatgtcaacagttattggattgatttttatcatttcaattccaccgcgtatacatccaattcaggggctttgtgtacgcgcatatctttaccacatacagcataagccggacagttacggcaaccgttatgatccttgttaccgatcaattcctgacggaatttcttagttttaggatgttcccagatatctttgataaagtcgctggcttccaggacgttaagcccttctgaccatccaccctcgacccaacgttcggtaaaggaacaggggaagaattcacccttttcattgatgtacgaactaaacatagtagcttcgcaatcttccgcatactgtttgtactgttcaaaattttcatgtccttccatagcctctacaaaggccggagcggaacaggaatcaaaaccgaaccctacaccagattcaaggcaatactctaccagagctttatactgctcgcgtgtaacggtatcccagttcttcccacgacctttttgtttcagacccaggaatacgatcgcgttaacttgtttcaagcgcggatcattctttacagcatcaaccacgttaaacgcgtcatcataggttttagagctaaccatgaaatgaaggttgatttgctgttgtccggcttctgcaagattagccactgaattaaacgctacatcgaatccagcatgtttgtatactgataccgcaacagccccagcaacagccgctaaacgcgctgcaacgtcttttgatacatcagcaatggtaaggtttggtacaatgcctttagaacgcgcataggccatcatatcaaacatatcagggtttgtttgtccctgtgcatcagcaccgagggcgcattgtgttaaccagggcattttatcaatgatagatttgaatgtatcaagatccatattgaagccgttagggttattagacttgtagcagaaaccgcaaagtttaccagcagggccattgcatttagttgtgatctcgatatcgagaatttcggggaatggggcataggtaggatcagtttcgaacgatgttccccagcgagcaaactcaccagttttaacgttgaaattgtagttataccacttagagcgagcgtaacggatatcaccatcttgatagatgaacagggtaggagctttcagaacagtttgtgcgttattcataatataattctcaaaatctaacatgggattggaagacagcgcgagcgagactttcattatcaaacggtattgattggtgttgtcctttgctatcaatgttaacgcgccaaaattcactagaacaattttcagtggagtagttcaacagcgttaccgttttattcttttccaaaaatacgcgtttgtcaatctctgttttgattacgtgttccatcattttacccaccgttgtttgcgttcgtcagccagttcttttttgtacaccttgatgtattcgccgttcaaggcacggagatttgaaaatacacgattgaaaagatttttcttttctttgtatgccggagacatacggatcgattcaatagtcatacccatttcatttttaggatacgctcgtaactctgcgccgatctcatcaatccatttttggtacaaatcacgcttttctttgtactgctcaaaagtcaacatataatttcctcacatttcgttgggttcaatataaccctataaagaaccaaacgcaagagttatttgtacttcataaagaatttaactgcttcttccggtgtcatatcgtcagagaacaacccgaagaaagtacgatgatgatctttgtacgaaatgttaagtgggttcaataaacatctaacctcttcaacccattgatagtattttttgctgaacggttgatctctcattattcatccccttgcgcgtagtattcacacactgcatcttctggggtgcaaccgtccgagtaaagagcatacatcagatcttcgtcataatcagaagaacccagcatatgttgaacagagcgtttccatttgttgtaatctttttcgccctgggtttcgctgttttctgatttaagcatttcgtacatgttcataggaatctcccgtaatcggttgcagcatcttccggatccgcatcaagttcatatagttcgcgagctagtgcgctgggtttaatatcgcgccctaagtgggcgctaacattacgtaaccatttcatatagggttcgaatttgttcattttatacgtaccgcgttaaaagcctggttccggagatcatacgctttttcaagctgttctgtagtgaacagaggactatcagagtttactgtgaaactgcaaatggttttgttgtcggcgtttacttcttcaacaacgatttcataaccccagatcccgctgtactcacatttcacgttccggtacttgatgtaaactgctgcaacatcttcttttttgtagttccggcttttgtagataatttccatgatatcctccttcgtttcgatgtgtgtataataacagatcggggttatcgattttagcaattcgtgctaattatgccattttcttagcgattttccaggcggctttgaatgccggaacatcttcaatatcaacccagaaaccagcaccaaaaccatcatcgtagcaagggcaaccgtcgcagtaattttcccaggtcatcacttcaccaccaacagaagcaccagtttccatagcgcgtaacgcatcttcaactttttccagtttttctgcgttgttgtcataaatgatgaagtaccattttccgttgtattcgttacccagtttgattgcttcgcgaacaagtttcatgatgatttcctttttgtctgtttcgtttcgatgtatgtaagataccacaaccagattttaatgcaacatttattttgcttcgagttcgatatttttccatgttttcatcggaacccctatcgcatcccaaaacttaacatcttctgctgcaatcagagtaaagaagactccagttttccagtatttcccgtttctgatttcgtttgcgatctcgttcaactggtcgcaaaaatgttcagtccaactaacatcaccatcccagcgagaacgtggattgtatagagaaaatatgaaactatcaatataagaagattttccggtagagactcccatcaaaacagccaggattgtgcgaaccgcatataaattctgaacctcaacacttctcgttttaatagtcatttcatgattcctctgttttgtttcgatgaatgcaatataacaaaacccctcaccattggcaaggggtttttgcaaaaattatcgtttgattggggtattatctataaccctttgaatttccgaacgcatcgtagaatactgacacaattcggtaagcgcccgatccaggtgcatcatagcataagaaaactcttttccgcatttgtcacatcgagcgtataaatgtaaatggatgcgcccgatcccatctacctgactatatttctggaatatgtaaggatctgcacctcgatagccagttgcttgatgcttacactctcgtttgaaccatgacattaataatatccttgtacgttgaagcgatcacataacaattttcttgtttggttagtatcgctttggatagaatgcaacatagcgctgatcatgtttaggttattttgcatcatttccgcgctcatgagaacttccatacgcgcacgtaagcgtttattttcttcttccaactcaaccatacggtcatatgctttgatgcgctctaagggcatatcaggacgctctttgagtacgcgagcacgttcaacctcacaagcatgatttgctttccagtggttcgattccgcttcaaatttattaaggcggcggatctcttcaaccagctttttgatcatgtgtggatccatcatgtcgatgaatttcatcaagcaattggattttgtttggttgtcagcaacagaccaagacgaattatacgtaaccgtaaacgtgcggcccatttcatcaacaaccccgatcttgttatcatcggtgattgtagccgcccatttctccctcatggctgtacaggttccgctggcgacactatgcaacttgtttaatgttgcgtcatcaaacacaatttcatcactcatgtatgcctcacatagatttcaaaatacgcagaagtgcgttagtaaagatatcaggaacacaaccaccaaacaacttatgattcatcagcgctaatttcatgctgtgattttcagtatatcgcccgttatggatcccccaggcaacgacattaccaggttcatgaataactaagttagtgagagtaacggtcatgcgctctttatcattgatagagaatgaatagcagtaaccggatccgatgtcgccgtaaaggttaaggtctttcaatttcccttgctcatgcaagcgtttcatatgaactgcacatgcatgattaatagtcatttcgtcatccctagcccagtcatcaataccagaggtataacgaatattgaagtagttagtcagttcatttgatacgctcattagaaacctcacttttataaaattctttaccagacccattacagctactgcatttgggggaacggttgttatcataccgccccgaaccgttacatgcaacacatttccttaatttccagccatacacgaacctcatgtaataatcggttcgtgcggccttgcgttcgtggaaattcatactttgtaaacctgaaccaaccacatttcgatgttaggcgcgtaagtaacgtttaccatcggcatagtgcggtatttgtaagcggctttgtacgcgtcgagttcagtcggaacacagaaagaaaaaccgttatcatagcgttctgcgttagaaacttcacaaccaactacagcggcaatgtttttattcatgttcatgatattttcctttctctgtttcgtttcgatgtgtgtaatataacaaagcccctgcactaatgcaagggctttttgattattttggtaatttttcgatggttgctttcaactcattgattttattaaagagttcatcgctatatttcatcaactcactacggcgtttttcggcccacttgatcaggaattcatgagaatctacaccatacgtgtaaccttctgcactcagttgaatacgagcacgggaaccataatcaacagaactttgttcaatgagaaacttaaccgcatcaagcagggctaaatcttcatgacttaccaatattccttctgcctttggaagatccacaacttcatcctggatgagttcacggcgggttgtttcttccagtgtttcatgattctggatcatcgtttcgaccggatcctttgccacgactggtttattttcacctacttcttccaaaaacatcaacatccatccaggaattttagtccggaaagaactttgtacttcactggtgcatgaatttcccagaatgtggatcgcgttaccatgcatatcaactttattgatatagataacgttctgctgttcctgtcggttgctaccataagaaaggaagcggcgtaacgatgtgttatgaccatacttccctaaatcgatttcagccaggcaatcaatgatcccacggttagaaaccttgtaacgcttaccctgtttgaaaaataacgattcttccaggtgagtaggggtaaactcttcataaagaacatagaattctttaggaattttgcgctgaaccagactcagtttacaattattagaaggaacaataacagcgtgaatgtttccttctgcgtcacacatagcttgcattacttgcggatagtaaagatggtctttcttgcaagtatagctatggatacgactctgccgttttttgaagtaccatttaccagtttcaaaaggcgctgttgtaaaattcattttgcattctcatacatagttaaaattgcttgcatatgttccggtgattgtggaacccctgcaaagttcactttcaaaaagaaattcaaccgatcttttatgttgcactcatcgagtccaagcgctggtaatgaaatgttttcaaaagcacgttgttcatgtctttccatttcaccccaaaacaaacgggaaccgttaggcatcggtattccaatttcattgttccagaatttcatgatagttgtcaagcgttgttttccgtcgatgacttctacccatcgagattcgttgaattcactatcaaccgcgatcgcaatgataccacaaggaaacccagtaatcaaagttttcatgaaagcatcttgctctttctgcttccacacgtagggccgctgataggacggattcagatccagatcgttgttcttgaaccagtgaatgtaactaccaaccatgatcgcatgatcgcgactttggaaagtttttaactcacgaatacggtttcttacaatttcatcagccattataaaatcaccatccagtatataatcgtaatcataaccgctacggtgaaactcattgcagcatacacccgcgcattatgaacctgtgttttcaattccgcgatctcttgatccttttcgctttcaaactcttcgcgagtaccataatacccaggatcgttggcagttgccaatctaaccgcatctttttcaaccagcgttgcgtaaccgctttttatctgtgtcgctccgtaccatccaccacgatcgttgttaatgatcaggtgatcgcctttttcgttatgttttgactcaccaattacaataacccgtttaccattcataatatgatcctaaaaggggccgaaacccctattttgcgttcttctgtagataatctaacagatttccgctttggtgtaaatctaaaactttagaaaacttctctgcgtttctttcgtttgtgagttcgtcgaaatgccatacaccatcatcagctattaacgcgccaggtgatgaacctgtttctacatcacgggaaagcgcaagccccagagggtgtaagatttcgcggttaatgcgccaaacaaggcccatttcagatagagtattaaaatcgacgtatttcatattatgcctttggtttcacaccgtaggccaacataccgaaacggtgatcgttgtctgcatctttaaacagaacttcgttaccatcaatgcagataacctttgcttccggatcgatgtatggaagcaaccacaaagggatcaggcgtaggccgctatgttcatcccagcgactgaaattaagttcttccagttcatcaagggaaagctcattaggatcgatataacggaaccatttggtatttttgaggcgttcggggaatgttacgatttcttcatagccgaattcagcactccatgaagagtaaacagtgacttcggatgctttggttaaaacagcatcgcgaattgatttgcagatatcgattaaattcagttgattttccatgatatatttctcatcttgctaaaattttaggcaacagttgccccattgttttacgtgcatgtgacggaatctgtgagatcgggacatatttaaaatcatccatttcacgtatagtccgtccgttcttaacgaaagttgatgcacaatagcattcttccgctactgggtaatcttgccctacatagaggaataaagcaaggttttttgttttcgtgtaatcgagaacacccagactaaccaattcctccgcgaacacttcaaatcctgtttcttcgaagcattcgcggatcgccgcgtcaatatgagtttcgcccttttcaacatgccccttcggaatatcccaatggggcgtttcagtggcatggcccatcaacacggcaccatctttaacaaagataatacccgctgatagttccatttattcacctgcaaaagcgttatcaaatgctttaagtgcgttgttagcgcgagcactggcttttgtctcaccagcatgaatgttttcgaagaaagtacgtttccacacttcgcgacgaatggattcatgttccagacggtttttgtgattactgcgaatctgttcttctgcgttataacggtacagatcgagttctgcgtttaatttctgctctaatgcctgtgcaaatacatgttcaatattcattttgtatagcctatttcagatttaaggttttcgagggtggagtgataaacaacattcccttcatgtcgagtataccatacttttccgttctggttacactcattcattacattttcatctaaaccagggatcggcttcatgctgggagaaaacgcgatagacatcatttgttctgcactatcagcaaacccacaagggaaaacagatccagttggtttatcaagatacatcaactctactttagccatagatttcttcgaaatcctcacaatcaggcaaatacgtttcacagaaggtgcaaagcgtaaagaatgcaggttgacgaataccaggattatccggtagatacatccagaaggtgttagcaaacacgatgaatgttttcaggttttcggtggtaatttcgctaacaccatcatacccggattgattgatcgcgcgttgcagtggcacctcgtactgttcgcaatagtcggcataatgatcgcttgttacaaggccattagccattttaatcaaatcgacgattttcatgattttacatattccactttaacaggttttgcaacaaatttatctttggtgcgcccatgaccattacacaggtcacattctttgttgaaatctttcatatcttcgacccatccagaatctggcaacccagacggatatgcgttataacgaatggtttcataaccttttccgttgcatttcgggcaaacatgaggacgttcttttttagcagactctgccagttcgcgaagggtggtagaactaccataagcccgacacatgttttcaaagtcttttaaagtcattctataaacatcaatgacgttatattttttgccggatggtttagccataatatatttctcacttaaagaattttttgatgaaagagatagcaaggccgataccaaagaaaattaagtaaccttttccgtcaccgtgcgccaaaacatagagtgagctgccgtatgcgatgagttctgcgatgttcattaagtttctcatgatatcctcctttttctatattaagtatcttaccataatataaaccaaagtcaacaacaaagttttatcaacccacttatcaccagtcattagtaatcccctacaggttgagacgccgcaacactcaggatcttgaaagtgcaattgttccattcacaataagtttttgcgcaatgaacacttcctttcataacaaacccgtttgagaaaattaaccagtaaagtttcatgatagcctcctttgtttcgacaaggccaatataacaaagcccctgcacgaatgcaagggcttttttcaatttttcaacatccaaagttgcggaggacaatctttagaagcgattagacgatccaggcgggacataacccgacgataaccgtcgtattcaaaattaatttttggtggaacgtagttgacctggattgtttttctgttagctaaagaaacatactcagggatcaccgttcgtaaccgtatagcgatcactggcttctcttcgccttcgttaaagaacatttgaacagttataggacaagcaaagattttaccatttacccgacgataaacaataacttcctgtgtcccttctgttttggccttcacagcgtaggttagaacataacacgaataatgatttgctagactcatcatgatatcgcgataagtttcaatatcttttttaatcgatactgaacggtctttaaagcgatctgaaatgtggtcagcagtagccgctaccttgattgtataccagtcacctaacgcgctagtaaacgcctcgctaacttcttttcgtacactgttaacaagatacattaaacgtgttctgttcatataatcctcacttatttttgaagtattcgatctgacgcaaacgcttttcagcggcggctttcgaatcgtattcaccaagttcttttgtgcgatcgtgattcaaaacaacccacttatcgccacgctgttcaatgtgttctgtaatatcttttaacgacttatccagatccagtgattcagcctcttcacatataatagtcaaatccacgggcagtgtcaacaaccttttcactccgctgatatcatcaagcatcgaatcgtatgcaagggttacgtgcggcttgtaatccggataatcgtatgttgcgccagcatcaatagaatctttgaaacggctatgcaggtattcagattccaggatccctacaatagtgctaccgtattttgtgtcccacttttcaacatcaaccagtttagcaggttctgtgatgtcctgttgcgggaacaaatcaaccgttttccggctgtatacgatcgttgtatgcatcttttcggctgaaacagcattctttgtgatacctaatgtcttttgaacatttttcaaagcctcacatgaagcctgatcgaatttagcacacatgtagataccaggatctacaacaggttttgtgatttcaagaaatgatttcataaaacaccccaataaaaaaggggccgaagcccctttgtaataaatttgtttttacgcttcttcgccaaaggcggcttcatcttccgcgactttttcgacttcaacggaagggatcagagcggataccgcgccaattaccgcttctggggttactggctggcttgcgtcaatacccagtaccgaacacaggtcggacagaagttgacgatgaacagagagttcactttctttttgcgcgataacttcgttcagatcgaatgcgcggcctttcagtaccagtacttcattttgcagtttttgaatatcagacattttattacccattgttaaaatttaaaagtatcgagcactttgctctttagttgtttcaaagtaccttcgttagtgatgatactatctccaggttgaggtgtcaaacctttttccgtggaatgttcatcaacaattccggtatcctttacaataaacacaaacttagcacctaagcgttttaggtatttgtattcgtgttcttgacgacagtcagtgaccagaagatggttgtattcgtcaccagtatatttattgacgaatctttccaacgtgtaacgaacccaaaccgtgttatcatacttgcatacgatatcagttccaaacacttgcatcaagcgtctgatactccagggagtatcgttactcataatcaggttatcaatatcatcaggactataaacaatattgtatccacgttctttgaggatttcaagcccgattttgaaaatatttagaacatcttcattagacatcacaagaggtttctctcgatcgcctttgtaaaaaatagcatccggatcagaatattgtccttcaatcatattgcgaatgtatggtttatcgtaaccatatcgctgcattgctattcttagcgttcttttgataccaaatgccagtgcttcacactgaacatcattgtacgcctcttgaataaatttagcaaccgtatctttaccagttcgcttttttccactaatcacataaatcattagctcattctcttttgagaagtgactacttttccgtcaatttcaacttccatatgaaggaagccaaaagttgccatacacgtaaccgcttcatcactatcgttagtataacccaattcaacctcacccaagtttgttgggaaggcaccataaaatctaaatgtggcgatcgttttcatctgggagttatccaggatatgcacagcgaatgattgcttaggatcatcccacgcaacagagttaaactcattgtaatcgtttgtgctcaacatccatatgtaaatcccaagatacgatctcatttcctcatcgactacaaagcggatcatcaaaggatcaaactcaaaagccgaaccaggtactttacctcgaaccatcatatttgcaggaatatcaactgatgggaggttcattgatggtagtgtaaccccttgaacttgtaaagtcaaacctttcatgtaactgttatcaggaatatcaacccgaaagtttgtaggtgagatttggtttaaaatcatttctgtagacataggatctcctttcctctatttagcggggaacgggatcaaagcggcctgacggggtaatataaaaatttgaagaaaatgcttgaccttttaaaatctttgatctataataattattaattaaaattttatcaaaaaaaatctaacaagatcaagtaaaatttaataaataatttatcaaaaatttttagatctgatcttgaattcataaattttatgatctataatatattaatattttattttatcataaatttttatgaagatcaatacttagatctaataaattttatgctttttctgaaaacttttcctttaccccgtcactaaatactggtactatgttcccatattggaaatcaggaaaaacaaaatgactcacttgaaaaaattcaaagaatttctgaccgaaggtaaaaccctcgctcgtaccgtagcacgtggtcaacgcgctaaaacttccgataaacattcaatcggttttcttcacttcaaacatggttctgatttcgaagttttagcaccggattctcacgatctggcatacttcggtaaaaacattgtacgtttgaaaggtatgactactggtaaagttcaagcggcttatgtcgattgggctaaaggtactgtttctttctacagtggcaatccggatgatgatctggatttcgacaaaccagaaaaattcaaagctgctactctgtatgaagaggcggaagaaaatctggatctgtataaccagttagcagaagatttcgaaattgagatccctatggatgaagctctggtgaaaggtaaagtttacaaactcccaagcaacgatatgcgtcttctgtacactgggcgttctaaaactaaagcaagcggtgaatatgcagtgtttaccgtagttgatgcttccggcaaacctcgcctagtatctggtaaaaaattcacccaggaatataaaggcgatatggtttctaaactggttctggctgaatccgaagatctgaatgaagcggctaaaggcattcgcgaaaaagttattgctgtgatggtgaaacgcgggtttaacgaaaaagatgcagaaaagatggttgacaaaaacctgaaagatgctatgaaagttagacctggtgcgacccctggcaaacttgcagaaatagttagcaccctgtaaaaataaagccccttcctttcggttggggctttttgattagtatttgctccagactttttttgcgccgtaaggtttccctttggacataaattgctgagtcggtagccaaacagctttcgcccaatctttcggggcaatctctgctaatggtgatttgaggtgtgatggtagatatgctttgatcatttctgttgcgcctcgcatacctttcacgttaccccagttaattttaagcacggtcttgttagagaggcgtttagtggatccgtaccctcgcttcaataactcttctaaaaactcctgtcgtgctctgggtggcgcatagtgcaagttcaaaccatagaacactaagttacccgctttcgatcttccggatcctaagaaaatgatcagtggaaatctatcccaatacggcagggtgtctttatattttgcatcatatgcaaacgtgtacaggcgacccgttgctggttttgccacacggtgtgttttgatactggttttgatgaaattaccaaaccattctgttgaatctttctgtcgctttgccgccgatacaccaacagtgatctttttcagactattacggaaatcgttgatgatctcgatcccgtgttttttacggtagtcattacgttttttacgggcttctgtctctgcggaacgtcgttcaatctcatcatcaatctgttttttgtaacgatgcattgactttgtgaacgttgcgtagtttaatccctcagaatcggcaaaacgtttagcagaaacacctttcgtttttgccttacggaatttgatccccagttcaacccaatcactcaatttgcgtttgggtggtgctttgggtttatcctcttccgcgatgatctcaaactcaaaaataaaactcatgtttccctccagggattactgacctcgccacccaaaaacttttttgagtgattcttctgttacgattttgaactgccagcctttttgacggcatagctcatttgcggctttccacttatcaatattaactgtataggtgtaaagagcatcaataaatttctttttattgtgtacgttgttgtttactggcttcggtggaggcatggtttctttaaggggcttaacctcccaaagatatgtagtaccattttccatttccacatagaaatccatgtaatagcgtcttctcttaccgtctgcattgcagaaatacgggatcactatacattcagaattccaacgttttacgtgtgggtttttatccagccacttcataacgtagcgctcccacgatgacctatacgtaatctttcgcggatcgcctttatacttctgtatgttttcgggtacaaacgaccctttatacgtctgtcttccagccattgcgtaaatcctaaatagaataatataacgtttagataggggaacttatcgtgctattttcatacttcccgcctgttgattacaaaggcacccagacaactgatattttccgagactatcgattttattttaatcgtgtgattggaaaatataaaacccgtagttaccagataacaggcacactacgacctgaacaacttgcagaatcattatatggaaaccagcaatactactggatcctgttgatgcttaactctgtttatgaccctttctatggttggatctccgatcaggaagccgcgtatcagtgcgctatacagcgttattctgaggttggcggtgaacaggttctgtatcatgtagatgaaaacaacaacaagtattataaccttgtcgaagaccccaataaccctggtcattggtatgacaaaggtgacaaaccaatgctgtatttacagtatcaaggtgtattagctcctgtagatatttatgaagatgcagtgttgcaaaatgaagcaaaacgaacaataaaaatcattagtccgtctgacatccaggcgtttctgaatgattttattaaagaaatggaaaaggctaactcatgaaattaggcggaaatttacactcccctttctttgatggggtggttgaaaacgttgatgatccgcgcgggttgggccgtgttcaagtccgtgtatttggacaacacccagcccaaaaacaaaaatccgatgcaatcggtgttcctgttgaagatttaccctggatgatgcctattcaggatattagaagcgctgcgatctctggtgtgggcttctctccaactggtatcactcgcggatcctttgttgttggttattggcgtgacaaatggcaccaagatggtatgataattggtactgtcgctggtgaatatgtcgaacaaccagacacacagaaaggtttttgcgatcctatgggtgaataccctcgctatgttggtaacgatgttaactcccttgcattaggtggtttgaaaggcaaaggatcatcaagtgtcatcattcgtgattcaaacacaagcatagcagtaaacccagacgatcgcccactggatgagataccagaagataaccgccctgatacgggtggatttacgatcgaaaagatgctcaagcaggatgaggggatccgtacacgatggtatacagacagtgaaggatatccgacaatcgggatcgggcatttgcttatccgcgaaaagactcgcgacactgcaaaaattaacgctgcgatcagtaaagcggtaggtcgagaagtaacaaacggaacaatcacggcagaagaggtatcaaccttatttgctcaagatttagccaaagtaagatctgatattcagagaaccgctaacgtccgtgaagtgtatgtgaacctcaaccgtcctcgtcaaatggcgatcgaaaacatgtcgtttcaaatgggcgtcggtggtgttgctaaattcaccaataccctgaaagcgatgaaaaatgaagattggcaagcggcttataatggtcttcgaaattcactgtgggctagtcaaactccaggccgttcttctcgcgtgtctaaaatcgtcctcacgggcaaccttgaatcatatggggtgcaagtaccagatccggaagggcgctctctgagtgctgcttacgctgcgtataacggtgctacattgtcggctactagtccggaagatccgtttactcctggtgatacccgtgtgatgtttgaagaaccagcatcatcttataatgcggaatatccgtataacatggtgtttgaatcgagatccggacacattcaggaattcgatgataccccaggatacgaacgatataaccgtgttcacccagcagggagttacgaagaaattcgcccggatggaacccgcgttgttaaaatcgtaggggatgactatcaaatcgtgatgcagggccggaaactcaacgttaaaggcaatttgcaggtcgttattgaaggtgatgcgttcatttacaacatgggtaacgttcaacaaacggttgatggtaacgtaactgaatttgttcgtggcaacgttcaacaaacggttgaaggtgagtacgttggcctgattaaaggcaatgctgaactaactgtaaacaaagatgcaacagttaacgttgatcagaatcttaccgcaaatgtgaaacagaatgcaaccgtagctgtaacagaagacgcaacagttactgcaaaaaatgcgaaaattgagattgaagaaacgatggatatcggcgctaaagatatcaatatcaaagcaacgaataacacgtttattgattctggcgcattaacaaaaatcactggcggcaccgtccaagtggggtaattaaatgattatggattatgaatcaataattgatggaattatgcaaaattatcagcatccttgtgatgctgagatccccgctggctattatcggcgggttatctggcaagggcatacagaaaattatccggctgttggggttgagtgggataccgagataatcaaaatcggtactcatctttatactcaagaacctttcggacatagaagcacggatctacctgttgtcaattcaccgggaacagatccaaataccggacaaccaacagggatccttgttccaaagattggttattatttcaacactcaggcagaaattgatgcttacattacatccattggtgcaactaaaatcaatggtggtaatgattggtatggtgcggatctgtcaaaatcaaacctatacaaaaaccctggcgaactggctatgtataaggttgaaaacagtggcgggtatctttccggaacaaaccctgtatgtgatgctcgcatacgtcaggcatataatcaggacactggcgcattcaccaatattgattattattggaatggtaatcgtatagcctatatgaagcatgacgaaacaggggcgcaccagtgcaaatatactggtatgcaggttaacaccaacgcagatacaagcattcctcctgttcctcctgcaatgccttccacttatggggcattaccgagtgaattaagccgtgctgatatttcgtgcattccggcaactgttggtttcgcatatacaaatatcagtgatgctatgttgcaggcatggaacgaaactcgtaatacgttcaagctacagtttaacatgttaacgggtgctgtacagaatggattcggtattgcgacgatgtttgatggtttatccgtatcgatggaagaagtaatggcgggggcgctcgcattgtcacagcaagcatggcaaactgctatgaaagttttcagacaagtgattagcgctgcgtttaacattatcggtggtgcatggggattgattaatcagttcttgcctcaagtaaccatcttaggtgttgcgatcaatatttacgatctggtgtttggtgataattctgttcagactttgaaagatgcatttaatgcaatcatcaaatccggacaacaaacatatgaaaccgtcataaacgcaatatacggggccataggaagcgcatacaattactctgtggaatatgtcaaagctggcgctcgcgaccttgtggatgcgtgtagcgcgttatttgattggtgtttaacgatgttccaaaacggttgtgttgcattaatcgacttatacggtcggatcatgcaaacatgggctatccctccggaagttccaaacccgttatggtctgcggtgctggctatccgtaacatcatgatgcaaatcaaaccacttgatataattctgggcggtaacttccccggattcactgcaatggatttgtatcaacaagcacaggaaaaagtcaaggcttttgttgatgagtcatacgaacagatccgagggctttatgaacaagggcaggaactttacaaaacgttaaaaaatcaaattttcgaacgtgatgcaattcagagaaaattcaaccagtacttaaactggatgtggggcgctgtaacagacgaagcaacagcggcttatcaatctgcattggatgctgcaaacgctgctgtagctgcaacacaggccgcgtatgacgctatacaggaacagattggatctctacaagatgcaatgaaagatacatacagcatggcgatggaagaattaaagaaattgcctttgatgagtacaataaacgagtttttaggattctgtggtgtcgcatttgacgatcttctcaagtcatatgaaaatgcgattactggtgctcagtctctgtacaaaaatttcattgatagttcgcgatcgtttaaagatcactgcaaagtaatctataaccaaatttgtacgctggcgttgagtaaagtcacacaatatgtgaataaattgctgtctctcataggattagcaatcaactttggttcgattagtgtatgtgttccagtactgaaatactaaatagtcgaatgatcaagaggaatttataataatggctactgctaagactaagactgtcaaaaaacagattaaccaaatccccgatatttttatcgggggtactttcgaagaaattaaaacagatctgattgattggctgggtggacaagaagagtttaaggattacgatttttccggctcgcgaatgaacgtactgatcgaccttctgtcgtatgctactctttatattcaacagatgggtaacacggctctatttgaatcgtttattcgcacggctgcattgcgtagttctgttgtacagtctgctcaagatctgggatatatgccagattctcgcacggctgcaagcacagcagtaatgattacggctgctaacccactgaccccaacatcgatccgtatcccgcgcggtacaaaattcatcggtactgtaaagaatacagacagttattcttttgttgtatcagatgacgttgttatcgttcgtgatagtaataacaactatacatcaatgctgaacctggtgcaaggccgtttagttcgtactgaactaatttatgacggttcgagtatcctgatccgagatccaaacattgaccgtagtcaggtacgtttaactgtaaacggcgcacaatgggaagactggacaaacgaaagcattgtaaacgcaacaggcgcaagcacgatttactatatgcgtgaaactgttgatggacataccgaagtttatttcggtgaaggtgaagcaagtcaacaagtggcgggtggcgcattaaccgctgaatatatcgggggcttgaaacctgctaatggatcgactatcgttattgaatacctgtcaaccgatggggaagcggctaacggtgcaaaagattttatctatgtcgatacattaaccaatattagcatcacggcgattaaagagaacccaaccaacacccctgattatgtcggtgctgatggtggtggtgatccggaagatatcgagcgtattcgagaactggcccctgttatgcgtgaaacacaacgccgttgtgtaactgcatcggattatgaatccttcctgtctcacagatttggttctatcatccaggcggtacagtgctttactgataacgaaaaaccaggttatgctttcatttctgttaaaccaaagtcaggtttgcgcctaacatcggtacagaaagaagatatgcaaacgtatctttcgaaatataacctcgcgacgatcaccccgtcgattatggatcctaactatctgtatattgtgcaatctgtaaaagtaacgtatgatatcagtaagttgacggaatcagaggaatggttacgcggtcaggttatttcgtcgatcgactcttactatactgacaacgttgaaattttcaacaaatctttcagtgtatctaagatgttgacttatgtcgatcagtctgatacttctattatcggttcggaagcagatattaaattgctccgtgaaattgacaactattacagcgcccctatgtctgggattcatttcttgaaccaggtggaatctaaatcaatcatttccagtacgttcaagttcaccaacgaacaagacgaaagttatgatgttcgttatgcttctacggaaatggatcaggatggtaacgcaaaaattgtaataggcccgttcaaggatggggatatttcgattgctgcttatacaggcgatgactttgaaaaattaacagatgcaggaacccgtaataaatattacgaagttggatcggtttctcattacaccgatttcattagctttgacctgggcgttctgaacgtatccgccgatagtttcagcgctgcttatatcgagctaaatgcaaaacctctcgaagaaaccatttttactcgcgatggttcgttgatcgtgtttgaaaatgacctgcgtcctcaatataccacattgactatgaatcctatcagtcaataatctttaacccctgtcttcggataggggtttttctttttataaatacgtgatatacataaccgcaaatttggagaaatataatgattaaagcgccttcgattacgagtttgcgcgttgataagctggctgctaacttcgtttaccttaaatgggatgatgttggcatggatttctattatgtggttgaattggcccgtagccgtgatatggacggaactattattccagacgaagagttaatctggacgcagttgggttatagctacgaaaacgaatggtttagcgatcaggttgccccaaatacacgttataaattccgtattcaaacaactcatgaagggtttgaaccttctgattgggtgatcagcgatgaattatggacgtttgatgagaacgcctacgcatatacaaccatgcgtgaattcacccctgctgattcgtttatcaatgaaaaattcgccaaaaacaatcgtgattacgtcgattttaacgatgatgttattatggcttctctgatggttgaggattttgtatactctcccctgtattctgatgtaagccagatcagcgataagatcctgaaacaagaaagctaccatgaaattcaagatcacatcgaacacgtttgtaatgatatagatcgcacgttcctggtatactcaaacggattgctttacctgtttgaacgttttcagaatatggctaaagtgtcaaatgacaaaggccaaacgtggtattactacaaagcattaaacgatcgtgtaggcaatccggtttcccgtaccgttgcttatcagagcgctaacactacgtatgtgttaggatacgatcgcatattttacgggcgcacgtcaacagatattcgttggtcttctgatgaagttcgtttttctgctgatgatgtaacgtttgcgaagctggggaaccagtcagggttagattttgatgttgattcatacaacacgtatgcgcgtctaccgggcggagtgtcgaagtatgccgaagctatagcttgttctagtgattggctctacgtggctgctaagaacgttatgcgccgtattgcgttacgtaacacaccaatcgatactgatcctggttcgccgacctttggtgaacgtatttttgatgaagtttcatataccatcgtaccaggaaatgataaaattgttgttaaaaaaatggacgtgctaaatgaccgtctgtacgttctggtaactggtgaagttaaaacggcgatgatggatccgactgtcaaagctaacgtgatcccatcaaacgatgctggcgtttatctgtgggatgagaatgcaaagacgtttacccgtgtttatggtaaaaccgaagatgaacgtttttatatcactcatgaatataccaatatgtcaaccaatggcgatgaagtttacatttctgttggtaactacaaatatccaggcactttgccagatccagatctggttgaaaagtatccggaagatgtgcattcagcggtgaaatacgatcttgttcctggttatactgcgagcatttctattaactttgctacagttcgtgcaaatcagaacgatcctacagtatggaactttgggccgcaagagtactacaatgaagcaaactttagctggcatttccgcgataaggttagcacatggatcaccaatgataaccgtcctctggtggtttatccggaaaccctgtatactctggttactgatagcgcgtctcctgcgtcaacgattcgtgtaaaccatgaagtttgggacaaaggaacagttactatctacttgaataatatcaagtttactggttttacaaagtacacaaacggtgttctgttgtatcgctcaggtggtaggataattggattctatgaactgtcataccgcgcaagggatgaactcactattttctggaaacccgataacactttaatggtggcaagtctggttaatcaggaacgtgaaaacccatatacgccggatattgaacctggattaatcgaccctgatctgagtcacatgatcactcgttttgctccgcaaagctatctggacaaccaacagttcgaaaaatttggtgaatactatctgcaatacatttcgttgggaagcaacagttactataacaaattgctgaacctcatccggaacaagtatccgagagagaaaaacaacgttgaatatttgtggtctgaaattaaccgccgtaacatttacctggataaaaccaaacgtgaggcagtggttagatttttcgaatcacgtgcaagtgatttctattcaacaaaagggatcgaagcaagttatacgttcctgtttaaattgctgtataacgaagatgtttccgttgagatcgaaagctccaacagtctcgaatatgatattttggttagttcaacaaatatcagtcaggatatcgtaggccggacgatctatacaccaactggacgcgctaacgttacatacatcgaacgtgaatatgaaaatggtcaattgcgttggtcaatgactctgcataatgctcaaggtaactttatcgaagggcaggttgtcaagtcagaaaaaaccaatttcaccggaatggtaattcgtggtgttcgtggtaaacaaatggctaacaactcgatcgactatataaaccgtggacgctcttactacgtgatgaaaattcgttcaaatctaccgacttcccgttataaggatgacgtattgaggtttgttcatccggtaggatttggcttcatgggtattacgatgttaacagtattcatcaactctggtttgtcaatgactcataacgagacaatcattgatattctgagaaactaccgtttcgatagtggttatcctaagttctggcctgatcgcattgcgagcatggacggtaacggaaaccaacaattcgacctggttactggtgaacctctgtacaccgcacacccgcgagcgggggaaccttttgatgtacctccggaatatgacgttgaagaaaaaccgcttaacggtgttcttccttctgcgcgacggttcgatcaaagtccgttgttcgattgctcaggcgttaaatattcacagttccgtaatttggtggatagacgactgaaagatgatgcaggaaacccacgtgatccaaatcctccatcacagattaaggtaggaaattaaatggcacaacaaaacttgtatcggtcggtaattactgcaaaattccgaaccgaaaacttgatgaacttcaaagatatgatcggcgatgccgccgatctaaacacgatttatatgtctattgggcgaactgaatcatgggcggataacgaatccgaccctaactttgccccgccatatccaaatgatagcaccgatggtgttagtgatatgtggacgcatatgatcggggctactaaagttcctggtgatatgatagatgcaattttaccacgtaaagactggggtgatactcgctatccaaacccgaaaatcttttactttaacgatattgttgttgtaaacaccgcgccttataaccgtactgatccgggtaaaggttggatggtttatcgtgtagttgatgttcctgatatcggttcttgctccatttcgagcattaccggaaaacttgaatgtatcaggatcggcggtatctggagtccgtctcatgaatcgagtgaacctccacgcggagaagctaacgggatcgacatgggcgacggctataaatgggaatacctctacacaatcccgccagatgtcgtgatcaaccgctgtacgaacgaacatatcgtagttcctttccctggcgaactggaagaggatccggtacgttggggttatgataacgtgattcaatggtatccaggacaatacgatctagtgtatcggttaaaggtgaattcaatgcgttttcgtgcatacatggattctcttttcttcccgcaatctacgcttcctggtaacaaagggttccgtcagataagtattattgtaaacccgttgattaaaaaggcaagcccgaccgaacctgaaaagaaagcaactggtgattactataatgctaacgcgcttgaacctgattccggacgtatgatttacatggaaaacagacaacctattattcgctcccttgatcagactgaggaagtgagtattgtattcgaattctaaggaaaaacaatggcttaccaaacagcaaaaaaactaattgatgtcggtgaaatcggcaacccatcaacaggcgacccgctttatgatggtggtgttaaactgaacgaaatgatcaccaacgtttataatgcgtttggtgatgtgcgtatgctgtctgcaaacgaaggtgtcggtaacatggtgatccatgctaccggatactatcagaaactaccacgcacttactattcaagtacaccgatcgaactgggttccctgcatgacatggatacttcaacaggttcgattaccgttgttcttccttctggtaaggttggcgaaggttgctacttcataaatagtacgggtagtgtctctgttgatcgtcctatcgcgtttcgtcctcaagttggcgatacaatcgcgggggttgcagaccagttgtacatcacgtcaccttacacctttgtaaaaatctggtgtaccaaaaaagaaggtgcggtaacaacatgggattattctgtagaatctatgttcggttctaaaacgatgcctgttgacactacggcgcttgtactgaaagcaaacccgactgctattcctatgttcggatatagcgaatttagcggggctaaggtgctcgtatacgcagaaaacgtagctggtacagttaccaaaatggcagaagttttaatgaccgtggatcgtgtaaacaaaacgatttattcaacggaatacgctattttgaaaaacagtgaagatgaaatgtttacattaaactttactgtcggtgctggtgatgtcgtatacgctaacgtgcaagcgatcaaagaagatcgaattaaattcacgattaaagcaatcgatacgattaaatcagggatcgcgtcatgaaacaagaaattttaataggtcaggttgtagacgatggtacaggcgattacctgcgtcgaggtggtcaaaagactaacagcaactttacagaattgtataacatgctgggggatggtgagatcccccatccagcaggtgcctggaaaacttttgcgggtacgacgctatcaccaaaatttggtgaatcatgggcgttgaataccagtgcaaacaaaatcaccgtaaacctcccgaaaggcggcgtaggcgattataacaaagttattcgtctgcgtgatgtgtggtcgcgttgggctaccaacaacgttagactgatccccgcaactggtgatactatcaaaggttccccaactcctaaagatctgtttaaagattttatggatgtggaattggtgtattgctctccgggccgttgggaatacgtcgaaaacaaacagattgacaaaatcacaacttcggatctggcaacagtagcaaaagaaacgtatattgctactcagggacaaactgacttccctaacgtattcggtgttggtaatgaatacaacctgcaatcgttcgaagtttactatcgcggtaacttgctgttcatcgatgagaaagacggattcaatgctgataactcagactatggatcgattggttctgctcctggtgaactggttgcacttgatggtaattcagtacgtcttaaaaacccgtgtaacgctggtgacacgcttcaatttgttacctatctagatgggttagcaacatggcgttcgagctatgaagcgtatgtgatgcgcatgtatcagactggtgatacttctctggaaaccgttcctggtgaacagtgggtaggtgatctggcaaccaaaaaagagtttacacctgctgaatttggtgttaaccctcgcgtgttgattaaccctaactcgtttgaactgcttctcaacggtaaacaactggttaaaggcggtgacgctgactatccggcgttttcctgtgaaggtgcggaaggtgttgatgaaagtacgtgtgttggtaactctggtgtatgggttccgtcaggacaggattatagtttagtattcactgattctgtagtgacttcaatcaagtttgctcaggaactggaatccggcgacgttgtaacgattcgttggtttaacaatgatattggtactctgatggattgggaaggaactggcggtattaaagaaaaagctgataaggtttatctcaataacgaagaagaagttatattgacgaaccgtatcgaatataccgattataataacccttctcagaaaacaatgcgtaatacaggggaaacctatcagggacgtattctggatattcaggctatgtttgatattatccacccgatcggaaccatctatgaaaacgcacacaacccggcaaaccctgctgattatatgggatttggtggttggaaacgttacgcagaaggttatttcctggctggctggacatcaaatgcagcggatcctgatttcgcattaaacaataatgatttagatagtggtggtcaaccgagtcatacggcaggtggtacaggcggtgatcgtggtacagaaatcaaaatcatcaacgttcctgaacttgtatcaaaagataaagttctgattgctgatgaaaatggtgctgtgatcattggtggttgtcagttagatcctgatgcttctggccctggatacactaaataccgtgaggatacattgaaagtgaatcatggtaacacattacctgataaaatcaaaactattccaccgtatatgactgcacatcgctggataagggttgcataatggcttacaacaatatttcaaaaacaagggagggcgctcgcgtcctctctaaagaagcagattacttacagtatgatacttatggtaagttgcctctgatcggcggtaaacgttcgatcggcgaaccaaacattgaccaaacaaaacgcggtgttctgtatggaaacgtacaatccgcaattgatgacctgtatacgcttatcgagcaaatcccgattaacggcgttgttaccatgactgaggatgcccctccaatcgctgtacagcaggttgagagcgtttcttttgatggtattgtacagaacatcgattcagaccaagaacaggctgtagttcacgtgtacggctttcctttcatctttgataatgggactaacgccgcaaccgtttgtgaaactgcatacaacaaatttactgaattcgttgcagcggaaaaatatttcgcagaagttaaccgcaaaggtgttgatggtacgatccttgaatgtcgatttattgatagtgttccgcacccggcaacaaatatctcagaaaacggtattcgtcaaatcggaactatcgacgtagccgcaaaaaatggctatggttcatgggttaagttgggttctggtttcttacctgatgttactccgcaagtaaccgtgtattacttcaaacgaattgcataaggataacacatgagtaacaatacaatcaaccacgtaagtgataaatccatttacgtgacatttgacccaacaggtactgattggcctgataccataaccaacgtacaagatgcgttggaaaaaataggtagttgggcgcgtactgatactgggcttcctatcgcaacaacttctgttcgtggtattgctcagatcgcaaccgaagctgatattaacgctggcacggataacactaagattgttactccgaaactgttagcataccgtatgcagaaccctaaagcatcacaaaccgtgtggggttatacgaagtattcgactgatgcggaatctacaaccgtaactaacgatgcatcgtctattactccgcgatcgctgaactatgtgttcaataaccgcaaaggtacagaatcggtttggggttcttctaaaatcgctaccactgcacaggcggttgctggtacagataacactgtaactatgactccgcttaaagtcaagcaagcgatcgcgtctctggttccggttcagtcaagtgcaaccgaaagctcgcaaggtctggtacaactggcaacagttgcacaggttcaggctggtacgatccgtgaagggtatgcaatttcaccttatacgtttattcgtttaactgcaactgaaagcaacctgggcgttattcgcatcgcatcacaggcagaagcaaacgcaggtactgatgacaccaaagcgattactgcgaaaaaattaatcaatacccgtgcaactggatcccagttcggtgttgtcaaattagcaacaactgttggttatgtggcaaacactgcactttcttctaatgctaatgtattgcctagcgatcgtagtgcggtaattaatggttctctttatgagaatagcgcaatacataacaacaaatatcagacgtggacagatcttgattggcatttcccagtaggtgctattgtcatgactggtttccagactgaccacggtagtttgtatatttgtgatggacgttcactgaataaaaataattacccgttactgtttgagcgtataggttatacatttggtggtggcggtgattggtttaacattccagactgtcgaggcgttgcagtacgtggtcatgaccgtgggcgtggactaaaccctaatcgtgggtatggtacatatgaaggagatatgttgggatggcacgaacacccattacaacttatctaccagaacggcggtaacattccgaaatggcaagcagtttacgaactgaaaagcgccgagaagaatgaccaaagcgctcgcgtatttgatgcttctataactaaagctactggtgtgggcggtgaagaaacccgcatgaaaaacatcgcattaaactacgtaattcgcgtattataacagaggttattaaatgatcatcgacaaattaaacccgttgccgaagatcccgtttgttgatggcgtcccagatgacgccacgactcaaacgaagattatttggatcaaaaacggtgaaactctggacggttcgccagataaagtgtcaaacactggcagtcttaaccgaactggtgtaaacatccagcagaacgcggttcagttagaacaaaatactatcacccataatgataaaatcaacgaagtaatcgatcaggttaacttgattactgaaaacattgatgctattggtgatgaaagcgtaatcaaaaaagttaaccagttggatcaggatgttcaggcattaactttatctaacacccaaacacagaacaaggtagcacagttaaccatttctgtaaatgctcaaaacgatgaaattggtgaatacaatccagaaaaggatcctaaacaccgcacaattcgtaatgatatcatttacattaagaaagaagttggttcatatcctggatttaacgttgatggtgatgttgacccctcttctactggtactggccttaaataccgcgtactgagtaaccaacgtgctatttctatgcaggaaactcgcataaccaaactggaagatgattgggcgctttccgaagtaggacaactgacagaagaggtaaaagaacttcgtgctgaaatgggtgattctggtcttgccacaacccgatcaatctatgcgcgaatcaagatccttgaggatggttctattttaatgcaaaatgaacttgatgcgattaatagttatatcggtcgcacgtcaggttcaaccagttccattaacgatcgtgtgaacagtctggaaacctccgttagttctctggctacacaaatcaatgatccggtaactggtatcactgcacaaattgcaaccattaacggtcaaatcggtacggcttctgctcagggtagtatccgttatgatattgcggaaactaaacgcagattgatggatatggaaatgattctgggtgaatccggcgatgatggattgcagggacaagttgcgatcttaactggtgacgttggtgaagattcagatcctaccagtatcaaaggccgtttgagtgttgttgagggtgaattacgcaccaacactagcgcactatgggaactgcaaggcgttgtaggtaactcttctagtggcctcgttgcaactagccagcaggttaacaaagaaatctatggtgatggtgttagtgccgatcctgttactcgcgctggtttgaaaacgacaacccgcaacctgttcactcaggtaggagataactccgaaggtaacgaaacgggcatttatgcactgattgccgaccttaataaacgcgttgaggatttagaagcgttgaacattgcacaggcacttgcagatcgcgtaactatcgaagatctgaatgctaaactggctctgtacatcaaagaagctgacgcagatctccgttatgagagcaaaaacccgcctctgtcattcggtactaacctaactggtgatactgaatacactactggcgatccattgtctctaagcgtaactatgaatggtggtgtttctccgctgtcttaccagtggacgaaaaacggtgtaaatgttggtactgatgctaacacatttaccatcgattcgctacagccttctgattccggaacttacaaagtaacggtaactgatgcaagccataaagtcatcgtttctgatgaactggcgatcactgttgcttaacgattaacaaggggcttcggccccttttgaggatctttatgattacgaacaacccagcacaattaaaagatgaaattctgcgccgtttaggtgctccgatcgtcaaaatcgaagtgacaaccgatcaggtttatgactgcattcaacgagcattagacctatatgcagaatatcattacaatggatctaacaaagggtatatcattcttaccctggggccggacaacccgaaaaatattttcgatctgagtaaagaacacattttcgcaattactaaagtgttgcgtactaacatgggttcccttgtatcgatggatggtactgcggtttatccgtggtttactgatttcctgatgggccttactggtggttctctgggcgggggtggttgtgcatcacgtacctacggaatgaacgcatacggcgcggatatgggctattttacccagatgatgagctatcagcggtcaatgcaagatctcctgtctccgcttcctgattactggtataacgacgacacaggacagtttgcagtatacggaaccgttaaagatggtgatattgttgttatcgaagcaatgatcagatcctttgttgatgtacccagtatggtcggtaacgtctctggatacgctacagcgggttctgatggtgaagataagccaactatagcagatatatacaataacccctacaaagccgtctcaggcggcgtgaaggctggtcaaggtacaagcgttcagagttcatcctctgcgtataacaaccgttgggtgaaagattacgcaactgctcttgttaaagaggtaaacggtcaggtgctggctaagtttcagggtatgcaattgcctggcggtgttgctccggatggaaccagactgatacaggaagctatgcaagaaaaagaaaacctccgtcaagaacttctgttactgtctgatgcacttccagtgttgatgatgtaaggaggaaaaatgcaaaattgggatgaaagtctgtttgcacagttagaagatggttccggcgtcgatcggaacctaagacaagaagtaacaaacccgtatgttaactggtacaagtataaccctactcaacagttacatgattcactaacagccgaagcaattcaaatgaaatctccggatatgtattacgtccgtcgagaatttgttaatattgataaaattttgggcgaagaccgtgaatcgaagtttacaaaatcgtggaaaattgcagcatatatcgattcgtatgcaaactacgaaggacagagagacttttacagcaaattcggtatgatgtcaaacgatgaaatgacacttgtgatcaatcctcgtttatttgcacatcaaactgatggcgggatccctgttctgggggatttgatttatttccctatggataacagcctgtttgaaattacatggattgagtttgacccgttcttccagttcggcgatcgtcctcaacgtaaaatcaacctcgttaaatttatctatactggtgaagaattggatcctaaactgcaacgaaatgaagggattaatcttgctcccgatgctgatctggatctcgaacctattcgaaatcttgatggattggctgataccaatattgaacagtacgaagaagatcaagcctttgaagatgaaggcgatgaattcattgaatcgtttgatgttgttaacgggcgcggatcaccgttcgcacagttcccataaatataaccaggggaaaccctatacatgtaagggtataggagaaatcttatacccgctttaacccatacaggaaaaagaaaatgtttggctactggtataatagttcgctgcgaaattatattgtcttgatgggttgtcttttcaatcacgtgcaagttaaacgcattcgcggcgaacaagaaaaatttatcaaggttccgattacctacgcatcaaaagaaaaattcctggcatccatgaacaagctgaactatgcatacagtcaggaaaatgttgctaaaacggaaacaattttaccacgtatgaatctatccctcgttgatttgcagtataacgcaattcgtaaaacggggatcgcggtaaaccaaaaaatgacgcagttacgcgcacctggaaaaacagtaacgcagtttaaccctgctccgtatcgtctcatgttcgaactgggagtgtatacccgttacgaagatgatgtgtttcagattatcgaacaaatactgccatacttccagccgcatttcaactgtcgtattacagaattacataaaaacgacattaaaatagaccgagatattaaaatatctctgcaatctgtttcccctgataccacgtttgaaggtgatacaacgacacggcgacacattgaatggtctttaatgtttgaattacagggctacctgtatccgcctgttaacgagattaaaggcgagatcagaacagtatacacggatttcttttccaatatgaacccgttggacaaagataattttgaatccgttgatgctcaggtggatccggttgatatgcctatacaggattacacgggagaagaatacattcaaacgtatgctaatgatatcccaattcctagcggtgatcaacctcctaaaccgaggggccaatgatggaagaatttagcgtaaaacaactacttgatcttgaaaatctccctggtgctgaaactggggaagaaatggttgtatatgaaaagctcgaactcgttgatgtcgagtcacacccagcagatcgaaaacctgatttagaggaagactatgcacttgcgcgtaaaactgcgcattacatgaatcagatgatcatggatatggcacaaattgccttgcataacgctaaaaactctgaatctccgagacatgttgaagtttttacaaccctgatgaatcagctaaacaattctaaccagggattgatgaaaattcataaagaaatgcgagaaattaccgaagaaacaacaaaaccaggatctgaaaaaggtaatggtggcggtagtgaaatgaacatagagaatgcaactgtatttgttggttcccctacggaattaatgcagaaatatggtagtgcatacgaacccaaagaaggcttcattaatggtgaagcggtagaggtaaaccctgatggaaatggaaccgacgatcgatccgagtaaggaatcagatcacccaatcggattaatgcatcccgattatctgaaaaagaaaattgatgaatttgggatggagtggacgcaaagcgaacatgataaaaaatggtatccgacaaagtttagcgattacctaaaaattaacggtatccataaagttgatattcaagcaaaagacagttcaaactttgcgacgtataaaaacaaaggaaacaagaaaactcgatataacggaaacccaaacctgaaacgcgcgtacatccaaacgaaatggacgcaacagatgttgatggagtgggttaaatgtcgtgatgatattgtttattttgctgaaacatattgcgcgatcacccacattgactatggtacaattaaggttcagttgcgtgactatcagcgcgaaatgctgatcgaaatgcataaaaaccgtatggttgcctgtaacctgtctcgccagttgggtaaaacaaccgttgttgctatcttccttgcacactttgtgtgtttcaacgaggataaatatgttggcgttttggctcataaagcctctatgtctgcggaagttctggatcgtacaaaacaggcgattgaacttctccccgatttcttgcaacctggtatcgttgaatggaacaaaggttctattgaacttgataacaaatgtaaaattggtgcgtttgcatcttctcccgatgcggtgcgtggtaactccttcgcaatgatctacattgacgaatgcgcgtttattccaaactttattgatgcgtggttagcgattcagccagtaatttcttctggtcgtaaatcgaaaatccttatcacaacgacacctaacgggcttaaccacttctatgatatatggaacgctgctatagaaggaaaatccggcttcgtaccatacacggcgatctggacatcggttaaagagcgtttgtatacagacggtgatgatggcgtatttgatgacggctattcatggtcttcgaagatgatcgccagttcaagtaaagaagcatttttacaggaacattgtgctgaattcatgggaaccaacggaaccctgatcgctggctggaaattgtcaaaactctcatgggttgatactgatgaaacggaaactaatttttatcagtataaagctcctgtagagggacataaatatattgcggtactcgacccagccgaagggcgcggtcaggactatcacgcgatgcatattatagatattacatctatgccgtttgaacaggttgctgtatatcattcaaacaaaacatcgcaccttattttgcctgatgtcctgttacgttatcttatgatgtacaacgaagcatgggtttatatcgagctaaatagcacaggccactcagtggctaaatctttgttttctgagttggattacgataacgttatttgtgatagctataacgatttggggatgaaacaaagtaaacgatcgaaagcgattggatgctcaaccctaaaagacttgatagagaaagataaactcatcataaataacaaaaagacaatacttgaatttcgtactttctcagaaaaaggtgtttcgtgggctgcggaagaaggtttccatgacgatctcgttatggcgctggtttgctttgcatggctaacaacacaaatgaaattcgcagaattttgcgagaaagacgatttgcggttggcaaatgaggtattcgcacgtgagcgcgaactgctttatgaagatatgttatgtcctgttatcgtaacgagtggcgacgaaacaatatctgtcggccaacacggtatttcgtttatataaatttagaggaaacttaataatggctttaatctctccaggcattgaaactaaagaaacatcggtacaatctaccgttgttcgaaattcaactggtcgtgctgctattgttggtaaattttcatgggggccagcttaccagatccgtcagatttctaacgaagtcgaactggtaaactattttggctccccagacaatgacaccgctgattatttcatgaacgctgtaaactttttacagttcggtcaggatctgcgtgttgttcgtgtcgtcgataaagaagccgcaaaaaacgcaaccgcgatctataatcagatcaaaaccacgatcaccgctgctggttctaactatgcagtagacgatcagatcaaagttaaacacaataacgttgttattgaagaagatggtgttgttaccagcgttgatgatcagggtaaaatcctgtctgtgttcattccgagcactaagatcatcgcacacgctaaacaggttggtgtatatccggatctgtctagtggctggactacagaaatcgtttccagttcttctggtgtttctgctacgattacaatcgacggcgtagaagttgatccgggtattactctgctcaaccttgacaccgcaaaagaaactattcaggcaactgctttccaggaactttgcaccaaataccagctaccgtctgttattgcaatttatcctggcgaaatgggtagcaccgtaacggttgaaattctgtctaaagctgcatacgattcttcggctgtcattaagtcttatccttctggtaagtctggtaaaaacagcggtcgcagttcgatgaactttggccctcagaatgataaccaatacgcgtttatcgttcgccgtggtggtattatccaagaaacgtttatcgtgtcaaccgctaagggtgataaagatatctacggttcaacgatctacatggatgatttctttgcaaacggtggttcgcagtatctgtatggtacgtccctaaactggcctgtcggattctccggcgttctggaactgggcggcggtacttccgcaaactccactgtaggcgctgatgaactcatggctggttgggatatgttcgcagatcgtgaatctctgcatgttcctctgctgattgctggtgcttgtgctggcgaaactgccgaaatttcgtctactgtacagaaacacgctgtgtctatcggtgaaacccgttcagattgcgtcgtattcgtttctccgccgcgttctgctctggttaatatcccactggctcaggccgttgataacctcgtagaatggcgtacaggctacaaaatcggtaatactaccccagttgataacaacatgaacgtaagttcaagttatgcgttcatcgacggtaactataagttccagtatgataaatacaacgatgttaaccgttggatcccgctcgcgggtgatatggctggcctctgtgtttataccgatcaggtatcgcaaccgtggatgtctccggctggctacaaccgtggtcaactgcgtaactgcatcaaactggctatcgaaccgactaacgcgcatcgcgattctatgtaccaggtacagattaacgcggttactggtttctctggtggtgctggatacattctgtacggtgataaaaccgcaacgactgttccaagcccgtttgaccgtatcaacgttcgtcgcttgttcaacatgatcaagaaagacatcggcgataacgcgaaatataaactgttcgagaataacgatgatttcactcgttcttccttccgtatggatgcaggacagtatatgtctaacgttcgcgccctgggcggtgtatacgattaccgtgtggtttgtgacactacgaacaacacgccggatgttattgatcgcaatgagtttattgcatcaatctacgtcaaaccagcacgttctatcaactacatcacactgaacttcgtagcaacctcaactggtgcggatttcgatgagttgattggttcaacgtcagtataacatgtaaggggctgaaaagcccctataaatacacatagaggttagaaaatgcttactgatattgtacgcgcctttgaatccggtgatttcgcacgtccgaacctgttcgaagtagagatcccgtacctgggcaaaaactttaaattaaaatgtaaagccgctactatgccagcgtctaccgttgaaaaagttccggtaggttacatgaaccgcaaaattaacgttgctggtgaccgtacctatgatgactggacaatcacggtatataacgacgatgcacacacaacccgtgatgcaatcgtagcatggtcaaacatgctgcatggtatgggtgaagacattacaggggatatccctgcaaactacaaaaaaaccgctacggttaaacagaaaaaccgtaacgacgaagtaaccgccgaacataccatttatggcctgttcccgaccaacgtgggagaggttactttagactgggatagcaacaacgaagtgagcacttttgagtgtactttcgcgctagactggtgggtttaaacgctataaatacaggggtagcaataccccttatcattatttttcggagttgtaaatgaacttttttggattagacaatgtgttagggtttttcaaaaatttcgccaaacaggatgaaatggaatttgaagcccaattaaaagatgatacaggttcgattgcgcctccgaaaaataacgatggggcgcacgaaatcgaaacggacttatcaaaccagcgttattcttctgtgttccaacagttctattccggacaggatccgcgaattcagaacaaaacacagctaataaatacataccgtggtatcatgacatacccggaagtggaaaacgctgtttctgaaatcattaacgaagcgattgttaatgaacaagggaaagatattgttacgatggatcttactaaaacgaattttagtaaaaatatccaagataagatcatggaagaactcgataccgtaatgaatattcacgatttcgataaccgaggctctcgtttattccgtgattggtatgttgattcgcgtatctatttccataaaatcatgcacaaaaatgaagctgacggcatcaaagaattgcgccagttagatccccgttgcatggaactgatccgagaatcggttacagaaaccctacccggtggggttaaaattttccgtggctatcgtgaatacttcgtatacaccgcaccgaaaaacggttatagctacaacggacagatttatagtcacaatgacaaggtaaaaattcctcgctctgcgattgtttacgctcatagcggccttgaagattgcgacaacaacattataggctacctgcaccgcgcggtcaagccagctaaccagttgcgtttgctggaagatgctatggtgatttaccgtattacccgtgcgcctgaacgtcgtgtgttctatatcgacgtaggtcagatgggtggccctaaagctacacagtacgtaaataacattgcacagggcttaaaaaaccgtgttgtatatgacgcgagcactggtaaagttaagaatcagcaaaataacctgtcaatgacagaggactattggctgatgcgtcgtgatggtaaagcagttaccgaagtttcaacgcttcctggtggcactgccttctctgatatcgacgatgttaaatggtttaaccgtaagctgtatgaagcgttacgtattccgttaagccgtatgcctcgcgatgatggcggtatccagttgggtaacgatggcggtattacccgcgacgaattgaactttagcaaatttattcgcgaattgcaaattcaattcaaccctgttcttgcggatccgttaaaaactaacttgatcgcgaagaaaatcattacagaagatgaatgggatgaaaacgtaagtaagattgcttttgtatatcagcaagattcttactattccgaaatcaaagatattgagattttggaacgccgtttaaacctgatgggacaacttgaaggggtggtcggcaaatatatctcccataaatacgtaatgaaagaagttctccggatgtctgatgaggaaattcaaagcgaagccaaacagatagaagaagaatcaaaagaagaacgttttaaaaatccagaagcggaagaggaaaacttttgatgaaagaatttatcgaagcaatcaaaagcggtaatctggtggaagctaaaaaaactttttactccatcatggaagaccgcacagaagcgcttcgtcacgaattacgcgttgaacttgccgaagctgtacgcatcgaaggcgaagaagacaaagaaaaagacgacgaaggcgctgataaagatgacgaaaagggcgataaaaagccagccgaggatgataaatccgataaagatgatgagtgaggtgtgtaatgcaacttgacatcgaaatcaccgccgaagatctccaggaacatttagacgaagcgaaagcccgtgtagatattctgggtatcgatgaaggcacggttaaaatcatcgaaaatttggcggtcaccgaaccaaatttagcccttgctatgatggcggttgttgaaggtttaacacttgatgaggtaattgtcaagcatgttgattcccgtggcaacgtagaacgcctcaaagacaggaaaacccgtgagcgtaatgcgtatcagacgaccggattaactaaatcccaacgtcgccagatcgcgcgtcgtgctctcaaaacaaaacgtgctaacccgtcaattgctactcgcgcacaacgtaagcgcaagaaagcattgcgtaaacgtgctgcactggggctataaatatgaatgaatcccaaatcaacgaaaacggcgatatgcttttaatcgaagaatggggtttaccttgcggtgacgtttcagaatctattttagaatctgttggggaatcaaaagacggtaaattgcggatcgaaggtattttccttcaagccgaaaaggttaaccgtaaccgtcgtttgtatcctaaaaacgtacttgaagaagcagttaacgattatattagaactcaagttaacacccgtcaagcattaggtgaaatgaatcaccctccgcgcccgaatgtggatccgcgaaatgcttgcatcctgattgaaaaattgtggtggaagggtaacgatgtttggggccgcgctgttgttgttgaaggcgacggtggtgatggtgacaaactggcggcgttgattcgtgctggttgggttcctggtgtttcttcccgtggattaggtaagctctccgattccggcaaaggctacggcgttgtacaaaagggctttaaattagctgtaggcgttgatgtcgtctgggggccaagcgcacctgatgcatatgttaagcctatagtggaaaatcagcaaagcaaaccgcttgttgagaataatagtgctgatgacgcttttctggcattgtccgagcgtttgaaaggtctataaatacattaaacaaaacaacaggaaaatcaaaaatgcttaaagaacaactgctggcggaagcccagaacctggatactccggtcgagttagacagcattttcgaatcagttgaactttctgatgacgtgaaagcgacattcaccactgtattcgaacaagctgtaaaagctggcgctgcaaaactcgctgaatcccacattacccagatcgcggaacgttccgacgaactggtcgaagctcaggtaactgaacgtgccgctgaaatcgaaactaagctgtacgaagatgctgataaatattttgcgcacatttccgaagaatggctgaaagaaaacaaagaagccgtttcccgtgacatcaaagccgacctgtttgaatccctgatcatgggcctcaaagaagttctggttgaacataacgttgtcattccggaagaacaggttgatgtagtcgccgaactggaagacgaactgactgagaatcagcaggaagttaaaaccctgtttgaagcgaatcaggaactgaccaaagaaatttcagaaatgaaacgcaatgcagtagtttcagagaaaactaaaggtttgaccgaatctcaggtcgaaaaagtagaatctctgattgaagggctggaatattccgcaaccttcgaaaataaactcagcgcaattgttgaaatggtagcaaccaaagctgaaaaacccgttgacgagtctgtaaatactccgcaaacgaaagatgactttgttccggtagttgaaagtgttccggcagagaaatccaagatcaataaatatgtacaagcggcaaaagccctttcttaatttcaaaaggtaagaaacaatgtctaagaaaaacgaattgatggaaaaatggaacgatcttctggagtctcaggaaggcttaccggatatcgctaccaaatccaaaaaacaactgattgctgccattatggaagcacaggaaaaagacgcagaagttgatccggtttaccgcgacgagaaaatcgttgaatccttcggtggtttcctggcggaagctgaaattgctggtgaccacggttacgacgcaaccaaaatcgcttctggtaactcaagcggtgctatcaccaacatcggccctgctgtaatcggtatggttcgccgtgcgattcctaacctgattgcgttcgatatctgcggtgttcagcctatgactggccctactggtcaggtgttcgctctccgcgcagtgtacggcaaagatccgctggcttccggtgctaaagaagcattccatccgatgttctctccggatagcatgtactccggtcagggcgcggctccgagcaacggctttaccgaactggcttccggtactgcgatcgctgacggcgctatcgtgttccacgatttctctgaaactggtcgtgtgttcctccagaacgtttctggctctccggttactgtaactggttctaccgccgatgctctggatgctgctgttatcgccgaacaggaaaaaggtactctggctgaaatttcttacggtatggctaccagtgtagcagaactgcaagaacagttcaacggttctactggcaacccgtggaacgaaatgggcttccgtatcgataagcaggttatcgaagcacgtagccgccaactgaaagcacagtactctgtagaactggctcaggatctccgcgctgttcacggtatggacgctgacgccgaactgtctgctattctggcaaccgaaatcatgctggaaatcaaccgcgaaatcgttgacatgatcaactataccgcacaggttggtaaaactggtttcactcagaccgttggctctaaagctggtgcgtttgacttccaggatccgattgatgttcgtggcgctcgttgggctggtgaaagctacaaagctctgctgattcagatcgacaaagaagcaaacgaaatcgcacgtcaaactggtcgtggtgctggtaacttcatcatcgcttcccgtaacgtggtttccgctctggctcgtatcgatagcggtatcactccggcaggtcaaggtctccagaagactctgaacgttgacaccactaaagcagtattcgctggtgttctgggtggcgtgtacaaagtatacatcgaccagtatgcacgtggtgattacttcaccgtgggttacaaaggcgataacgaaatggatgctggtatctactacgctccgtatgttgcgctgaccccgctgcgtggttctgatccgaagaacttccagccagtaatgggcttcaaaactcgttacggtgtaggtatcaacccgtttgcgaactctcgctctcaggctccgtccgaccgtatcacttctggtatgattaccaaagaaatgttcggtaaaaacgcatacttccgtaaagtatacgttaaagggctgtaatagccaacttttccaagagggaaccgcaaggttcccttttttattacataaataaagaaaagtttgtcaataacgcaggaacataaaatgagtgaaaaattttacacaattaacaagctggtgcgtcagtcacagctaccgcctggcctgtctaaaaaggttcttgatgaggcaaccggaacagaaacaattaacgtagctaatacccgtccagatctggtatctcttacccgtgcggtaaacaacctgatctacggtgaacttgtagcgattcaggaaactaatttgcctaccgcaaccctgttcggtgtgcgttatcgtaaccctaaaggcaatatgacgttttccagcgctgctacctattccggtaagtatgcaagccgtgatactattccagatggcgcggttggtactgcctacaccaaaggccaagtttttaaacacccgacaagcgatgtcgtatacgaagcaactgatagcgtaactctcgcaggtgctgatattgatgaagcgatcatggtcgcagtattcagcaataaattacgcctggcaagcgaagccgcgccaacaagtcagtatgaaaccagcgaagatattagcacaacttcttttgaaatggatcgttggaatatcaacgttcgttcccgtaaattcaaaactgaaatgaccgtggaacttatgcaggatctggaagcaaaccaattcaacgcagaaaatgtgattgaagatgttctgggtactgttgccagcgaagaagtaaacaaagatatcatccagactctgatcaacgtatcacatcgttacaacgttgatggtgtggtaacaaatggcattttcgatgctacaaccgcatacactgcaaaggatgctccggctttaggtcgtttcctgtatcaattagtgtgtgaaatggggcaggaaatgaatagaacgacttcatttgaagctacctatgtactggcctcttctcgcgttgtaagcgttctgtctgcgtctggttggatgcatgaaactgatgaaacccacccgttagcaacaggtcgacttaaaaacggttactatgtctatactgacaccaatacaccgtttgattacctgctgactggttgcaagtacgatctgggtgaaatggatcatgttggctctctgttctatacgccatacacagaagctgatcaggcaggttcgatcaagatttctgttgatcctcaatccttacagcctaaagttgctattctgatgcgctacggtttatcggttaacccatataccactgctgcaaacgaaagacttgtgaaaggtgatgactgggtaaacctctcaggtaaatctaagatgagtcagattgtgggtatcaaacttcctaaactgggttgatagtataacccaacggggataatattcaataggtggagtagggaaacttactccatcttttaataattattataattaatattaaattagatcttgaatttataaatgatttatgataaaatttattaattataattattatagatcaaataatttttgaaatcaagtaaaaataaatttgattttataaattatatcatgtaaaattattcttttaataatatattatattatattagatcaaataaaatttgactacaaattaatatagtatattatagatcaactgggtaaattggtgagtatgttatgagtttgaaattagaagatctgcaaaatgaacttgagaaggatatgctgatagatcccctcaagttgcaatcagaatcagcggatatcccgaagatttgggctaaatggcttcgataccattcaaacgctaagaaaaaattgatccaacttcatgcgaaaaaagaagctgatgtgaaggatcgtatgttgtactacaccggaaggcatgacaaagaaatgtgcgaagtggtgtatactgggactactgaaatcaaaatcgcgatcgctggggatccgaagattgtagaaaccaacaaactgatccagtattatgacatggtggtagatttcaccagtaaagcactggatatcgtcaaaaacaaaggatactctatcaaaaacatgttggagatccgtaaattagaaagtggtgcataatgtctactgaaaatgaaaaatgtgtagtgtgcaagtgtccggttccttctactggttatgtgactgaatccgggcgcgtgtgtagcactatctgtgctgactacatcgcagaaaaaacaaaaagcggcgagatcaacgaatccgatgatctgaatgaagttcaaatgttgctgtaggagaatcttatgattggatacggtgaaggaattacagatcgtgatgaacgtccagatctcttagaatctgacgaacaccctgatttttagtgcataaatactagcgtacccgaaaggggcttgataaaagaatgctggatgataggcgtactcttttgcgccgtccgatggagtttaccttcggcggggtgattgataatataccttcgatcaagggcatgtgaatagaatagccagaatagtacagcactggcgttaagcaaatgtacaaaagccccttcctttcggttggggcttctttttagaacttttcttcttctccgctttcgagttcggcctttaattcttcggctcgacctttcagcgcatcgcgcatagaaatatcgtctgacggcgcaacatcaacttcttttacacgatttttgtaatatttttcaagctctttaaggccgtccatagtacggcaagaggcgaccttgctcatgaaatcatcaatagccgcctcataaagtcgaaaatcgttgaaactcttcattttgacctctaaatttcgatttgtttgatcacgtagtcaaacttttcttcattgtaaatgcgtactcgttcgattgcgtgtttcataccatagtttttgtatgaatatttatttttagcatttttggactttgccagcgttgctaagttatcaaccaaatcccaaacagtagcaagagatttagaatcatgtttacgcagtacgcgcccaattgactgtttgactataacagcagatttgcaaggatgtccgaagatgatgtgatgcaggttcttgacagaaatacctgtactcagtacaccaatagaaccgattacgatcagccccttcgttgattccgcgatccgtttcatttcgtttcgctcatcaatccccgtttccccagaaatgtatacaacgttgtcatatacctttttgagttgctcatacagccatttaccatgtttgatctgattgaacatcacaaacacgttttcatctttttcccttgccagtttcaacgccagcttacagatccatgcgttacgcctggtatgcgatgttatatacttgatttcgctttggtaatcagcccccttcattttcttaatctcatcctctttatatctcatgaagatggtattaattcgaaggttggtaacttgaccttcctgcatcaaccgatttgtatcaactggcttgaagatttgaccaaaagcgccaatgtattgcatcatgtttgctttgccttctttcagagaaccagaaaggccaaacttgaaaatacactgatccattgtattgatgatcttctgtatgctttgtcctgttgatttgtggcattcgtccaccatcaaacacatgaactgttgaaaccactcaggaggcattttaacagccgattgccacgtagacacgtagatcaatgcattactgtttttagcagttcctgaacgtattccaagcattgcctcgcgaggtaaaaggcgatagttgacaatatcaccgatcatctgatcaacaagggcggttgttgggacaatgattagtactttgcctgtgtaattttccagacaccaacgagatatcaacccctgaataagagatttacccgctgacgttgggaggttaagcacagcacggcggtttttaatcgcatggaacaccgattgtttttgataccaatacggatcaatctgtttgtttccgtcgtatactgggtgttcttctaaccacttgtcaaaatctggctgggtaatttcttctgtttcgtggatcttaggatccatccagatagaatacccgcgagactccgcgaattttgttacaagataggctaaaccgtagggcagtttcccgttatagtccatcaagtatatgtagccgttccatccaccatatttgtattttgcctggtactgataacctggcggctggaagctgaaatagtcgcgcaattcatagactatgttagcctctgcctgaatctgcacatgactagtgttaaggaatttgacttcgatatccactatgtgtatcctatatacggtttatatgaatatttataggctaaataatgataaacattggagaaatacaatgagtattgattacgaaaaggttgaaggtttcaaagccttagaacaaaaagaagccaaattacagcttgctacctacgcgcaagaaacgtttgatgtcaaacttaaccgtcagaaatcattcgaaaatatgcttgctgatctggaagctgccgtaccagcagaaaagccggaactgttgatcgactcccccgatccggaaattgttacatacgaaggtgaaccatccgttcctgatgtttctccggaaacttctgaccagattgaaattgttcccgacgctctacaagctcctgtaagcgattctgagacgttttctgatgaactggcatggatggaagggtttaccccgtctatcatcatgatgggccgctctgtttcgaatactggcttttatacgtgtccgtattggatctatgattggatgaaacaaaatccggattggtacaaacaccctgacagttgtcctcattattcagcgcgtcaaaccctcaagtcactggcatggtacatgcatcgtgatgggatggttactgtaagggaaacccgaaacagccagttctacacgttcaaaaaataattttaaaaagtagttgaccttgccctgctattcgagtatatttgtattcgaaggcgggggaatggctctcgcagtgaagaaggaaatacaaaatgaacatgatgaaaaatgcttactacccagttctgtttgtttggactaatggtgaagttaagaaaatcgtcaattctaaagctccttattacactgttggtgaagcacttcgccacgctgcggaagcgaattatcctgttcatgccgaaccaggttatgctcgttggaacggttctaaatgggttgctgatacctgggacaactacgaagaagaaagaatggagtgtgatcctgattacgtatctcgtcaaatggaagctcatatgattgcagatcgtagactggataatgaagctcgcggattctattgattaacaaggggctacggccccttttcttttaggtgaaatatgaacttaaatcacgaatgtttaaaagatttgagcgacggtaacgagattggtaacgttatttttcttgatatcgatggcgttctaaataatatgcggtgcatgaaatttggtgaacatatggacatcgaatgcgcacgacacttacgccggatagtgaatcacgctaattgtgatatcgtcatttcctctacgtggagaatcggcaacagtacccataatctacgtgaaatattttatccgtggggattgtatcggatcattggtaaaacttgcactaactttcctcatagcactggaatgcgtggtgatgaaatcaaggcatggatcgatactttcggatgtaaaaactatctcattcttgatgatgataccgatatgctttcttcacaaaaagatcattttattaaaactgatgggttcgttgggttgaccgaggaacaatccacctatgcgatccgtaacattttcggggttactactccgttttgtcctgaatgtaatgggtatggacgtgttaacagctacgacaaatgcggaacgtgtaacggtaaaatactccggctataaataccaataaacataagaggttaaatttatggcaattccttctgtaacaattagcgccaacaaaaacgaacttttgattggcgaaactttgaccttagaggttgaaaatactgaactagatccgggtgatgtgtttctggcctaccgttggcaaaaagatggtgtagatattccgggcgcaaccgccgatacttacacaactacggttgacggtacaactgctggcgattataccctgatcttaaaacacggtgctgatgaagaatcagcaacagaaaccacgtctgatacaatcaccgtgaccacttatccggtaatcgcatttggtactgatttacctgcaacaaaatctgttgttactggtaaagaacttaccctgactgttgcggtaactggcggtaaaaccccgtatacctatgtatggaaacgtggttctactgttgttagtggtgattctgcaaccttaacaattagcgcggctgcaagtggtgatgctggttcatatacggtagaagtgacggattcactgggtaacagaaaaacttctagtgcttgtgttgttagcgtcacacctgctctttcatttgataaaaatctaagcccgacctcttccgtaacacatggttcagcattgatccttagtgtaactgtattgggtggttctgctccttattcttatgcatggactaaagatgattctccggttggtgaagattccgacaccctgaatattgcaagtgcggatcttgatgatgctggttcatataaagttgtagtcacagatgcgaattcagacaccatcacatcaactgtatgtgtagtaactgttaatcagaattctgatgatctcgtttctaaatggacggttcatccgattccgtggcgtgataccagctttaccccgatcggttattgggtacttgatgaaattctgtatcagaaagcacagggtaaagattggaaaactgattatgctgattacaagtatagtgaggaagtacaaacgatcctgaaagcgttcatggaaaatggtgaatgtgagatccaggattcacgaaacggctatattcataaaatgagtgaaatctaagaggctttaaatggcaactgaaaaatggactacggttcatcctattccgtggcgtaataccagttttacatatcttccatactggctatacgatattatcgttgatgcttttgagaaaggcgacgactggcgcgattatgcggaagaaaaatataaattagagtttgatactctgaaagaggcgtttgaagattatggtgatattcatgtaatcgaatctcgtaatggtaaactggttagtctgttgtcattgactcctgctcctgaaccagaacctgaccaataaaataaggcaaacaatgaatacacttctttttgatttcgacgacactttagcagaattttctcaggctttttatgataagtttggtgtacgtccggaaggaacgccaaaagaacgatatgacgaaatggcggcttctttggtgcgtactgatttttataaaaaccttccccgtattcaggctgggatcgacctccttcaatggagtttccaacgccgaatcggtgatcctgctactttgctgcttcgcgcggaagcggtcagccctctttgggttatgaaagaaaaactgaactatacagataagatttgcgctgaactggggatccctcgtctcgattttagtcgcattgactatccggaacagttcgcagaacatgcctatcgtggtgttctgatttcccgcaaccagaaacatcttgaaatctggaacaattctcatctagctaataaagttcctggtattttccttgcggaaaccctggaagaaaatattcagctagtcacggaagcgcttgcaaaggctaatcaataacaaaaaagggaaccgcaatggttccctttcttttacaatctttttaattcatcaagcgctgttttcttatcaccaacaaagaggattgctttacctcctgcttttctgaaaggcaacaccgcttttgcccgatcgtcaaacagaattcctttaccagcgaatgctgctttttcatggctacttttaacgtagtggaattctggaacgtaacccaatactttttgtaatgctttacgtttttgttcggcaacaccgtcagaattgaatttaccgacactggttagtattgctacatcaccaagtgttcttaaatgatggaataattcaaatccttctttgattggttccagattttcgtagaaatcagttttggcaatttttgctttgcactttttcaactcatcttctgtcatcatagagggttcgccatacattggcacaaatgaaccttcccagtcgaacaatacaccatccatatcaaagaaaaacttattcatatcaattcctcagtttgtgtatgcatactataatgtttaatcattaatgtcaaccccaagtgtcagttttcggtgcgtatgctgcaactttagccacaatttccttatccagttcagctacagatttctgaggcttaccacgggctttaactttgatgtagtttgacttaacaacaaacatccctttgttacttgatttcttgatctcgctgtcaacaccaactttgttaaaactgatccaaatgtctccgtccatatactgtttaagagaatcacccatgttcaggatcttcgccatagtaagggccgcgccttcgtgggtatccatgagaatttctttaggaactacacgatcgcgtttctggttctgctgcatagcaatatgaacatcgttcataacccatacgatatgtacgttttctttcttgtatcccagcttttcgacatcacgcgcgatgcttgccagcttgctcatgccttttaacgttacgtcaaagatgaggttaggtttacgatcttctggtgctgccataataccggaataaacacggttttggtttttgttggaaatgttgaaaacgtcggcgatcacatgatggagggtagatacgttttctgggtttttgaggttcattgttttgacatcatggcccgtttgtttcttgatctctgctgcgagtttatcgctacccattacaagttttttcagggcgtcaacgtccagggtaataccttcgatgcctagcagtttttccagtgtgaaccctttaccggaaccagcaccgccagccagaataacaacctgaccgaacttaggataagcacggcccccgaaggtgatcagcgcttcggttaaggtgctttctgtgaattgtttaaatgacttcatgtaaaattctccagtttattttctattatttattgacatgctttctgacagtggtgtatggttactgtgttcgacggataggccggaagaactttaaaccataaggtatacgatatgaaaatcaatttacatcgcttcattgcagacttttcccgcgaccgcgacatggattctttcaactattactcccgtgagattgaagatcgttttgcggctcatgttggattccgtcgccaccatacccctaaaatgcgtcctgaccacgacccgaagtatagccctattatgtggcaagcccctatcgatggttacgttgaagggatccggatcatgacgtttaacgcgatgtatggaaacgctttgatccatatcgcacgtgagaaaaaggcggaatttcctaacggctggcgtattgatgaagtgattcaaaatcttatgcagttacgacgtgaatacaaagcgggtatgtgtctgcgtaatgaacagtatccgatgtataaaacatatgcctatatctctaagcatctaattaattccatgttttacatcgttggtaatcatggttccgctatagatataggttcttatgaaatcgtggcttatgctcgcgaacaaggaaaggccgctgcactgaaaatcatcgaatctggtgctatcattcttaaccatcgcattgatactattgcttactatggtgatcaggttgaggttgaaggcgtacaccatgaaagattcaacaaagctgtatttactaaaaatggctatgcgtatggtaatgaaattataacttctgctgttcctctcgttcgcctaactgttgaagggtttggagaaaggatgtcttataaaccgtcagaagctcaaatgtgcgcggctgctgaaagaatcgccaaaaagcggaaaatgtataccgatgaatacctggcgtatgtcaacaagacaaaagaagatgtagatcgagaaatttcttgcatggatttataactttgatataatctaagcatctttttaagggaggatacatgaaaacgatacattgcagaaatgaaaacgttgtttactatcacggttcgtgtactgctgctggtattgaaagcatgttattgcctccctgtgattctgatactctgtctgaaaaaggcaggaagaaaaatttagaccgtgttttctttaccgctgatatcgggttagctcgtatatacgctggaagggccgcgcgttctataggtggggatcctgttttgtacagggttgtgtgtccggttgatgttgtatgcatgaatgaagataaaggcgcgagcgtttaccatgcagcatgggcgttttgtgaggaattatgaatgataaagtgttggcgtatctcgttttcttgctgggatatcgcttagaagtgatgggcgcgtattcatcaatgtatggtgatttaacggctatctggatggtcgggttaggggttgcttttacattcctttcctttgcaattgttaatgaatcggaaaaggatattgtatgaaactatatcatgtgatctactctggtgttttaggcattgacaaacaaacgttagttgatgtaatgtgtaaaaaactcgatgaacgaattggaacccgatacaaaaatcatgtatcggaaagtattttcatcaacgttgaccatccaaatgacatggaagaaatggttaatactcttgatgatcagcagatcccgtttgttgacaatttcaacatgagcgctggagtgtatacggtagtaacttttgttctaaaaaatgttgacatccgaaacgatagcgtgttgaatgtagttgcaaaaatcgattctaccaaaggaaaataatatgaaaattgtacaccgtagcatttccgaactgtctcaagccgaaaaagtgcaaattcatttcaaattcaatgatttgcgtaaaggttatgccgaaattgcccgtgaacatgggttagataacggcgatatttaccaggtagtacaggaaattgaacgtatccgcgcgttccgttctgcaaatctccctgttaaaaatgcaatgcgccgcgaagcgatcgaaatccatcgtaagcgtgtgtacaatttagaacgtgctaaacgtccgatgaagaaagaaaagaaacctcgcccgtttaaacgtgaacatcttaacacctctatggcgctggcgtttcaagatgcggggattatctaatgcgtaaatctgcgatggatcgttgggctagtattgctacttcaaacgtaaaaccaaatcaagccgcacctgatgtagaagcggttcgtaaagcgaaagaacctgagatcgtggcccttagccccgaacttatcgaacatcgccgccgtgcgtctgctattgaactggatctgcgtattgcgcgttcatataatctcaagcacgaacacgccgcgaagaacaaccattcttttgaccttactctggaagattggaaagtgttgatgacaactgaacgttgtcagtattccggcaagatgtttagcaataaaccaggtagcccatatgcccgtacaatggaacgtattaatccacgtctgggatatacacaagaaaatacaatagcggttatcaacgccgctaatgccgaaaaatcacagcttgatgcattcgttaagggtgatgtcattctggatgaagtaaaagtgaagttgctgcgtaaagcactttatcaagtcgaaaaacgtgtgaaaatgaaaggttaaattatgtttaagaaatattcttctctgactaaccattatgaaggtaagttcatcaatggtgtaattatgaacgggcttactggcggtgtgtgggttgcacgtgaaaagatccacggtgctaactttagttttatcaccgatgacggtattaccgttacccccgcaaagcgtactgatgttgttaagccagccgaagatttttatggctgttcagcagtagttgcaaagtattccccagggatccgtaagatgtgggaaaccctcaaaaagaccggaacttatgatgatttggttattcaagtctacggtgaatttgcggggcgtggtgtacagaaagatgttgattacggcgaaaaagatttctacgtattcgatatccgcgtaaatggtgaattccttccggataacctgtgctcgctgatctctcgatctcatggcctgaaaatggccccgctgttgggatacggtacttttgaagagatcaaagaactgccgatcacgtttgaatctgttgtgaataaagcaaatagcggcattggtagcgataatacagtatatggtgaattcgtatatcctatcatggacgttgaagagggcaacattgcagaaggttttgtaatgaaacctgtttcacctgcttttatgccaaacggtgaacgcgttgcaatcaaatgcaaaacaaccaaattcactgagaagaaagcgaagaaagcaacccgctttaatgctccggtttcattgtcagaaaaagacaaaaaccaactcgatgagtttgtttgttaccttacagagaaccgtgtgaaaaacgttctttcgaaactggatctggcttcgatcactgcgaaagatttcggtcgcattatgggcttaacggttcaggatgctatcgaagaaatcagccgtaatcatgggcctttcctcgaacagttcgaagatccggcaatggctaaaaagctgtttgtaaccgaagcccaaaacatgattcgccctgtatggggcaaaatcctgaaccatgaattttaatcagattctggttgatgcaaaagcggctaccctgatcggtagccgtaaacctcctgaacgtatcgcaaacattgctgttaaaatcggacgtgctttgaacgaacgcgggattcgggcttattctggcggcgctcctggtatggatagtcactttctgtttgactatagtccggataacaggtgtataatccttcctgagaatggttttaacggacttttctcaaacggaaaggatatcatcgactttcgagatttaaacacgcagaaagccgctgacgaagccagaaaggtagcaggtaacttcgatacacagaatgaatacgttcaaagaaggtatgcgcgaaacacgattcaggttcttcgtgaaaatcttgacaacccaaccgattttgttttattttgggcggaagaacgtgaaggatgtgttaaaggtggaacagcgatcgctgtaagattggctagattgtacagggttccatgtttcaatctcttcaaagaaagtgtattgaacgatgtgtgtgatacgttagggatcaatatcaaacccccaacgttggattttttatggtaattgaacatgcgcccttacttcgtgaaacatacgaaagatgggctgttaataacgcaataggtgaaaatatgattcatgtacgtagtatcggtactgacggtgaaactccagtagaaggccgatcaccaactctcgcagaacgagcaagagaaattatcaacgatcagaatgctaagatgatcgaacatgcgcgggatacaatcacaaaaggtgttctgaaacacgcgacacaacaaagccttatctatgatatgaagcacgatatcggctcttgtctgggtattgaatgtactcgctatgcgttccaacgggtttctgaatggttggaagaagaagggctaacattcgataccgaagaaaaacgcaacgccgcgaagatcacaaattctctggctagtaagtacaatcaaacgtaccgaaatcaggaagaacgtgaagtgttcggtttcaaaattcctgaaaggaaaacagatcgccgtgtaagtgaattcactttttacattagttggtaaaaaggtgttgacgggggttggttatagtagtattctaactcccgtagacaagacactaactcagaaggataaacatcatggaaatcgtaatgaaagcaacttatgctggatattgcctggaagcaaaaggtgttgctaacaatggcaaaggcttacgggccaatgttgaagcaatgctggatgaattacatacaatgtacgaatatgacaacgtagcgggtagcgttcttatccaggcgttggaagttgatggtgttgattgtgctggttggtgggatgcttacattgactacaatgataaccgggtttacctgttgagcaacaaagattatttctaaggaaccactatgagcgatgaagctgaggctttagaagattgggctgattttgatgacgaagaagacggggaatatttctgcgttaacagtggtgcttacaaagaccgtttagaacttcgtgaacttttatccggttcctctcaaatatcaggatccaaacgaaaaagtagtaaacaaaaagttcaatatagtgatggttctgtacgtgatgaaactgttgttgctgaatttcgtggtcgggttatcacaaaagaacgacaaattgatgtaaagaacttgtatgaagtggctaaggctgctaaaataggttatgtgattgtttgccctgtgtgcaaagaaaaacacacaaagacaacgtatcacaaagttttctgttcgaatggcagaaaaaccagtaaggattgtaagtctaaatatcacaatacaatccatcccgaacgactggatcgggtattttaaaataaacttaaaacgtggagtacgtttatgaacaacaaaactttcgaagaactgaacagcattatcacttccgtagattcctataaggtttctcactggtcgcaatatccaactggctccgaagaggcgctgttttatattgaatctcgtggtggtaaatttgatcaagtagttacggctggctgtaaccgccttgcgcaaatcctatcacgtccggtgactatggaaaacgtagattttgctaatcggttgtacaaaatgcactttgggcgcgaaatcttcaactacaaaggttggaaagaaattgcagaactgggttacatccctcttgaattcagagcgattccggaaggaaccccagtagcggttaaaaatccggttgcaactttccatgctgggaaaaatgcgctgtggttagcaggacacgtagaaaccctggcgatcaggggagtatggttcccttcaaccgtagcaactctatcccgcgaatgtaaaaaagtgttgaagaaatatctcaagaaaacctccgatctcgaaggtgaagcatttgatatggtattacgtacccgtttgcatgacttcggcgcacgtggaacctcttctgctgaatctgctggtattggtggccttgctcatctgtataacttcctcggtactgataccgtagaagcgctgattatggctatctctctgtttgaagattgtcagaaagcgtttgatgatggtgaaatggcggctggtatttcaattcctgctcgcgaacattccactaccgtttcttacggcaaagaaaacgaagaccttgcatacaaaaacagtattgagatcttcggtgaagggatgtatgcatgtgtgtatgattcctgggattttaaagcggcggttcgccgtatcgcagaatataaagattctattctttctaagggcggtactctggtagttcgtccggattctggcgatatggtagacaatatcatgtacgctcttgaagaactgggccgtatctttggctatacagtgaactcaaaagggtataaagtactacacccagcagtaaggatcattcaaggcgatgaaattcatggccctgaaacaatcaatcgggtgttgaactggatggagtctaaccgttgggcgtctgaaaacatcgcgtttggtatgggcggcggattgcttcaagaagttacccgcgacactcaaaaatatgcgatgaaaatgtgcgcaatcaaaattaacggtgtgtggactggtgtgtataaatgtccaaaaggcgctgaatggaaaaagagtaaaaaagggttgttaatgactatcactgatggtgttaactttaaaaccattgatactctggaacagaaagtgccggaaggctggaaagatgctatgatcacatactatgtcaacggaaagattactgcccgtgacactttagaggaaattaggaaccgtgccgggatttagtatccgcaaaaacgacaaaggaaccgtgattttctatgacaacatgccccttgtagctcgcaaggggctttttgctaaaatcgctgggtattcctttaaactggaagaagtcaacgacgaaacactaaaagagatcgtaagaattgccttacagttaagaggtaagaaagacgaacaaaaagctattgacatgatcaataaattgggtgaaactcaatgcttcatagtgaatcgtggttacaagtacgataccattgcaaaatttgaaaaagggctttgtgaattatgagttattatggtgtgatcccatacacaggaaacaagcaatcgctattacctgaactattcaagctgttccccgaaagaagttcatacatgcgtttcattgattgtttttgcggtggccttagtgtgtcgctaaacgtccctaaacccgttctaagcaacgattatgataagacgctgattgatatgtatgagcgtcttaaaacgcttcctgacctgtctccggtgcgagaattgattgcatcgaaggggctggggaaagacaataaagaagagtatctgaaattccgtgatgaatacaaccagaacaaagatcctttatggctctatgtcctgatcctgcattcattcagcaacgttaaccggacaaacgacaaaggcgattttaacgctgctgtaggaaaacgaaccctcaactttatgacagaaaaacgtttcgaacatttcaaaaagaatgtgacaggaattgaatttcgttctggttcatactctgatattgaaatcaacgataacgattttgtttattgcgatcctccgtatctgatcactgatgcggtgtataacaaattctggaacgcagatcacgaacgcgagttatatgctttccttgactccctgcatgagcggggtatcaagtttggtttatcaaacgtgacacatcatgcaggaaagcaaaatgatatcctgatcgagtggatgcaaaaatacaatgtgcataacctcgataaaaagtatctgttaggccagcatactgattcttacgaacaaaataaaacgcaagaagtctacgtgtgcaactaccagaaacgcgacgtaaatacataccctgaaacactggatgacttaatgtaaggtaacatatgtttaagatttttggttatatcccttctgtttataattgcgctccatgcctgaattctaaacgtctcctggacgcaaaacgaaaagaatatgagtttgtttctgtagccgatgaaaaagacgcagacggcaaaccgatcctgaatgaaacggtcatttctgaactcgaaagcctgttaggtactcgtagactgaccatgcctcaaattttccacgatggtaagcacatcggcggctttgaccaactgcgtgagtacgttcgcacgttgggataaatattaacacctttatttgattggtgttattatgctcactaaacgtattactaagaaagattacccaacaatcaagcaagctctctttgagaaacaagggggctgttgtgctctgtgcaagcgtcctttagagggcgacattgaaaaacatcacctcgaccatgaccatgctttagacggcgaaaacgccggacgtgtgcgcggcctactgtgtaacctatgtaacggtacagaaggtattgtaaagcacaaattcaaccgatccggtctggtgtcccgtgatgttgactacatcgcctggttagagaatctgcttgcatatctcaagcaagactactccgaaaaccgtattcatgacaaattcataccagataaggtaaaatggttttcaagacttaccaaacctgatatgattgccgaaatggtttctatgggctttgagtacgccgaaaaagacgaacgcaaagccttaaccgcaaaatatagaaagcaattaatgaaggcaacgaaatgaaatatctaaacgctcgattatcaacacaacagaaaaaaaagctgatgatgttgatatcctccactgacaaaaagatcatatctctgcatgattggatacttggaaggggtgactctgatttgtgttatgtcaaaccgaaagaccgaacgatgtttgatgatcgcggtcgcacattgactaatttttctcctatcaccgttattgatatgtgggaactccttgagattgtaggacgggatatacctgttgacggggttgaactgatcaaatatcttaacgagattggacacaatttagatattatccataaggcaacgaaatgaaagtagaaaaacgcgacgggaaaaccgttgattttgatgaagaaaaaattcgcaacgctgtgtataaagctggtgggactatgacggatgctgatgccgcaatcatgctggttcagtacaatcagatccgcgatggtagcgcaatgaagatcgcccgtatccaggaactcgttgaagaatccctgatgaaaacgaacccagcggtcgcccgtgcatacatcgaatatcgccacgatcgcgatattgcccgtgagcagaaaagtaaactgttcaaagatatctccggcatggtgaatctgtccaacaaagagatcaccaacgaaaacgcgaacaaagacgcaagggtattcccgacacagcgcgatttgctggcgggtattgtggcgaagcatttcgcccgtaatcatatccttccgaaacacatcgtagaagcgcatgattccggtgacatccattatcacgatctggattacagcccgttcaccccttacactaactgctgtctggttgacctgaaaggtatgcttgagaatggtttcaaaatgggtaacgcggatattgaaccgcctaaatcgatcggtgttgctaccgctctcatggcgcagatcaccgcacagattgcctctcaccagtacggcgggacaacatttgcgaacgtggataaagtgctggctccatacgctcgtatgacgtatgaaaaacatgaaaaggatgcacggaaatacggtatttctggcgatcgtacatacgcgatggaaaagactgaaaaagacgtgtatgacgcgttccagtcttatgaatacgaagttaacaccctgcatactgccaacggacaaaccccgtttgttaccatcactttcggtactggtacgggtatgtttgaacgtatgatccagaaagcgattctgaaaaaccgtattcgcggcctgggtaaagagggtatcactccagtattccctaaactggttatgttcatggaaaaaggaatcaaccttgatccagaggatcgcaactatgacatcaaacaacttgccctggaatgttcttcaaagcgtatgtatccggatattattagcgcggctaataaccgtcgtattactggctctagcattcctgtatctcctatgggttgtcgtagtttccttagcgtgtggaatgatgagcacggtaatgaaattcttgatggacgtaataacctgggcgttgtgacaatcaaccttcctcgtattgcgattgaagccgaagcacaggaagatgaagacgcgcatgatgcattttggcgtatccttgatgaacgtctggaactgtgctttgaagccctgatgactcgtatcgatagcctacgcggtgttaaagccagtgtagccccgatcctttatacagaaggtgcgtttggtgtaaggttgaaacccgatgatgaaattctggaactgttcaaaaatgggcgtagctctatcagtctgggctatatcgggctgcatgaaacgctgatgcttttcggatctggacaacacccattcgaccggatcggttctcagaacatgggtagactgattctggaatatctacgcgctgcgaccgaagcatggaaaaagaaaaccggatttgggtttagtctgtactcaacccctgctgaatctctatgtcatcgtttctgcaaactggactatgagaaattcggaagtatcaaagggatcacagataaaggctggtacactaacagttttcatctggacgttgaccgcaaggtaacaccgttcgagaaaatcgactatgaagccgattatcattacattgcaactgctggacatatcagctatgtagaattccctgatatgaaaaacaacctggaagcccttgaaaaagtctgggattatgcaatggataaactggactacttcggaactaaccttccggtcgataaatgctttgaatgtggctctgatgatgaatttaagccaacagaagacggttttcattgtacccattgtgggaatcaggatccggaaaaaatgagcgtcacgcgccgtacatgcggctatttgggtgctcctgctgtccgtgggttcaacgaaggtaagaacaaagaaatgatgcatcgcattaagcatcaaaattaatcaaaaagcccttgacttcggttgagggcttttgttatattgggcctatcgaaaaaggagacatattatgaaactgactaagaaaatgaccgatgtagtggcatgtgcgtttgcattaggctacaaagttgaaaatcatccaactcgcgttgaagtcatcaaccctatcaagggccgtcctggtttggttctgtgtgaagacggtacagcatatcgtaatgatgtctctttagaactggcaactactatccgcaccgcaaaacaaatgaaagatgttctcattagcggcgcaaaattgagggctttatgatgtattggacaaaagataaatttgtttttcgtgatgatacgtgctttgggactgcataccgaaacttagctattcgtggtggttcgttttcggctaatgatttgtctaaggtagtattccctattaaagttactgagtatgacgtattcggtgttaaagggtttactgattactttgatacaaagtttgaatcagaatcttacatttttactaatagcgatcgtgaattattcaaaaaacacgttgttgttaaagagaaaccattattaccaaaagaagacgaagcaaaggaaatctatgatctcctgaacatgcttgataatctcggtacttgtcatctgttcggtaaacgcgcccgtaaagcgaaagatgttctcaatctgttacgctctcgccggaattacctgatccgggaagcagaacgtaatctgaaaaattcagaaaaacaggtcgatgttcataaatccactcttgcgaaattaaaggctttgtgatgtttccgttatacgctaaagtgcgtcgaaatgtcggtgattcgtatcaggaatggagtgaatggctacgcgaaacaaagtcattctacatttcaaaagcaactgatatgaaaggccgtaacattcgctatcgtaaacccagtggtaagcgagtgaatgggatagattacattgttcttgattcgattcgggatgatataaaatgattagcaagatccttgataagttatttccttcccgtattgttgaacgcgagaagagacaaaatcgttttcagaacgctattgactatctcgaagaaattcgatttcagaaattcctcgaagataaaaagatgcgtgaagatgagaagcacccaaattctaaaatggctgacggtgtaacaaaatgtgctgttggtcggacgtggaaacgaaaagactacaaggatcttgtttctgctataccacgcggaagcctggaagattactcaaaagcaactggccgatcttatatcggatgtcttaacagactctgtatgattggtgttgtcaagagaatgactcctacgtataatcatgtttatatggctatcgtaaagaaaagaaggttgcaattctatgcagcatctggggaatctatcaatctaattgatgatttaattgaagttgggtatgtagacgacgggaaaattttaaaagctcctgattatctacgtggtaaactattgaaataggtataaattatgattttcaacaaaacaaattcatgtaatttgaactatctacgctgtgaactggaagctaacgaaattgaactgtttttctgtggggctacagatccggaacataaattgcattgggtatcaggtgagattgtaagcctaaccgatcagattgtcgaagaggctacccgccgcaatgcaatcgttaaaattggtgctattgatgtgaactacgaaggacatccttcatttttcattcaatattatccataaaagtattgacctgtatatatgaatgtagtaacatccttcttgtcaactaaggaggatgttatgaaaatcaaaaacactgctactgaaactctttgcaacgaaattgcagaaatgtactggagtaaaggtcacttagaggctatgaaagagtttcaaaagtggtgtgatacccaaaagttagctaaatgggaatacatcgttattgttgaacggatcaaagaactgatcctcgtgaagaaaggtaacatgaaatgattcaactgaaattagacacaaatgcggtgttaagcctgtttccggaaggttcaaccgctcgcgtagatctccaatctgctatcatcaaaaacgtggtgaatagcgtagttggtaagcgtgttagcgaagaaatcaacaaacggatccaggaacagttagctgttctaatgccgaactcatccgaaattacacagatcatcaaatctgaattctcggattacgtcgaaaaacgttatgggtattccaatgtttttgatgtcaactatggcaatgttcgcgaactgtctggtaaaatcaaagaatcggtaaaacagcaatgccaaaccattcttaaagatatcgagaaagaggcgattgctcatgcaacagaaaacattattgcagacgaagccgcgtttatcgctcgcgtctcgaataacctggaagttactgtacgcaaagcagtaatgcaacgggttaacactcagttcccagacattattgacgaagcgatcagagaacgtctgtttggtgaaaaagcatgaattacgaccgcatctataatatggatgtggtcaacggaaaagggatccgtgttgttttgtttgtgactggatgcaatcataaatgcgaaggttgttataacaaatcgacgtggaatccttgcaacggaacaccgtacacggaagagacagaaaaccatctgatttctctgttgagtaatccgcatgttgatggacttacattaactggcggcgatccgctttaccgcgacaactatcctactatcctaaaactgcttgagcgcgtttctaaggaacttccaaagaaaaacgtatggttatggacaggatataccctggaggctttacaggccgacccagaacgttctaagctacttccttacattgatgttctgattgatggtaagtatgaaaaagatttgccaacgaaaaagccgtttcgcggttcagataatcaacgtatgatcgaattcgctaaaaattcgatagaaattaaaaatattgcttgacctaatgtgtaactatggtaatcttaccacatcgtaaatgacgattaactttaattgagagataatatcatgatcctgaatttcaaaacccgtaaagaagcgcgtaactactgctggaagtggaacattcccctgaaaaccatccgtaatacagggcgcggttcttgcccgtggacagttcaagcaaatgaactgaaaacgttcgtggttggtaaaacttacaaactggttgaccgtgaagggtttactaccaattcacacggcggatctaacaccgcaaacactatccaggcgagacagatcgaaaaattcctgaataacgaggtaaaaattatctcgaaaaccaattcagatactttcaaaattgagcatactccggaaatgacttttagctctctgcgttcgtgggaagctcgttatttcgtcgaagttggcgcggctccggttaagaaaacgaaagctaaaccgaaaaaagccaacgttacggctccggtcgcacctgttgcaccagtaacagcagatcttgatcaaatgcttgatggtggttcggcaatgtcggttgaactggatcctactaaatttgttgaaggccgttcgtatgttctggttaaaccgcagcaatttaaaaatcgttgtggtgctaaccacgggatcaaatcatataccgatgaacacagtaatggtgtatacaccgtttaccatacgacttcgctcggtcatcatcaattgagcaaaacggtagaaaccattgattcccagaccggaaaagttggttactacctgcttgattctgaacgttcgttcttccgtgaactggcgacaggaactgttgatgaacctgttagcgtttccggtaatagcgctattgctatcaatgtagacgaagcggctaagaaagaagaaatcgcaaaagcaatggcacagcttgaagaagcggttaaagcccatgatgacgcgcttcaaaatctgcgtactgcttccgacctggttcgcaaagctgctcgaaaagtagcagaagtaagcaagtaaattaaactgggtgctccggcacccttttttatgaggtgacacatggaattattagaaggtaaatcttataccctgaacattgacgctaaagaatttgcagaaaaaacctggcgaaatgctttagctgaattgatcaaaaacaacggctatatcacaatcgatcgtattgcgattggggatactgaggacattgcttatgttctgcaagatgatttcgaatatgagatccctagccatatctggaaatacttcaaaccatatgatttgccggaagaagaaccgaagatcgctactaaagaagaaatcgccgcgcctgatttaaattttgtatcttccgatcctaaaatgtggatgactgtaaaacctgttcaacaagatatcaatgatctgcgatttgattatccttttgtcaagcggatcacttcgatttctgtactaccagcgccgacggattcacaggcacttgaatttgcattacagcatgttttcggtgataataagctgtacgcgattgacaaggaagctgctattgatgaacagaaaaaggaaatcatcaaccttctttctctgcatcaacaacttgaagcggtggaattgattgagcgtatgctttctgatacaaagaaagatatcattagcaaaatcactccggcacgaaggaaagcaattgatgaaaatcgagatttacggtattcccgaatcgcttcataaatgttacggctgtattgaagctcggaaattacttgatgagcatggattagaatacgaattttattctgttctaaagccagcaaataacagtgtggggtttgattacgatcgaccccgcattgaagagttagcgaaacgtgttcgtagtcgaagcatggcatttacttaccctcggatctttgtagatggtaattttattggcggttatatgcaattgaaagagtatttgggtgaagcatgaataaagaatacattcgcaaagtagcaaacgctattcacgcaacaacgattgattttctggaagggtttgatcatattatccaccctgaaacgctggatagttgggaagccaaactgtttaaaagtatcaatgaacagtttccggaaaaggttaagcgctggtttatcagacaggaaatcgtagcaacgatccttaatgaacgtggtgttgaggcgttcggtgtaacccctctatataaacgaaaccagattacagacgaaacaatcaagaaatataaaaagatggttcggaagtaataaataatcagttaaatggccttcgggccatttttttgtatataaatattggtattgaatacaatataggaaaaaagataatggtagctaaatcattccgcgcacgaagtggccttgatgctgctggtgaaaaagttatcaacgttgggaaggctgatcgtaatacgctgagtgacggcgttaacgttgactttttcaatgaatttaacggaatccagcagtatgacccgactcgtggttattctcaagacatggcgatcatttatgcgcgtcgtatctggtacgcaaaacagaatattgcttcccctgctggggctttcgacgaatccaaatggatcgcaactcgtaatgacccgaaatgggtttatagtaacgtaaccactccagacggtagcattattgaatctggtagttacattatggctgatggacgctttactgaacttctgtacctgttgccggacaacccgacagagggcgacgtaatcacgtttaaagattgcggtggtttagtaggtgtgaacagtatccttgttaagtctaacacccgtcagatccgtttacgtactgtacaatcagcacagtatagactgactcacccgtacatgatcgcaacgtttatctataacggtaacgtatggcgtgttgctgaaactctggataaccgcgattctgagatcgtgaacgcaaccggaacaggttcattccagttacaatctggcatgacagttttccgtaacagtgctacaggtaaaatcactctccagttgccgaaatatgcaaatgatggtgatgtgatcacaacctatgacgctgataaaatgaactctatcaacgtagccgttttgcagatttatccaggtagtggacacactattactgatggtgcaagtactggtgttacttcggtaagtagccagaaatccggctttggtatgttcatctttgatgcacagaatagccaatggaaagtatatgatgctgataaccgtgttcgtctgcgtcgtatctacagtgatttaaacgcggttcctaatgattacgtttttgttactgcaaacccttctgggactataccaaacgttactgttacccttccaactgatgttgctgatggtgatcgcgtttacgtatccctttatatgatgggtaaaaaccagaactgtacaatcaaagttaaagatggtacaacggacaagatccgcaccaacaaaaatatgatgcagttcccgcagcgcaaagattatccgcctaatgattggtttagtgtaacttcattagcttttaatgctggcagtgattacctcccgtatatcgagttttcttatctgaaagctacgaaagaatgggttgttgctaattatcgtccaatcgttgaacgtgttgatgcaactaacagatcgcgtactggtgttattgctctggctgcacaggcagaagtaaacaaaaacttggaagataaccctaacgacgaaaccgctattactccgatgacgttagcaaataaaactgctactgaaacccgtcgtggtattgcgcgtttagcgacaactgctgaggttaacaaactttcaaccgatacctatctggatgatgtgattgttactcctaagaagctgaacgaaagaacagcaactgaaacccgtcgtgggctggcagaaatcgcaactcaggcagaaaccaacggaagcaccgatgatattactattgtaacccctaaaaagttgcataaccgtattgcatcgccgaccttgactggtatccttgcccttgttgctactggtggtgctcctaacaccaacacggatcgttctcaggctggtactggggtttatgaccattcagattatcagaaagcggtaacgcctaaaactcttcgtgagtataaagcgactcagttacaatctggtgttgtatggctggcttctgaaaccgaagttattaacggtactgttgcaagttcaaacgttccgaccgttgttactccggaaatgctgcacaagaaaacctctactgatggtcgtattggtttgatcgagattgcaactcagacagaaacaaacgctggtactgattacacgcgagcggtaacgcctaaaacgcttaatgatcgtgctgcaacggaaacgctgacaggtatcattgcaattgcaaccactgccgaagtatcagcaggtactgtaacgaataaagcgatcgtaccgtctaaactgaaaggttatctggacgatacaagccatattactgttgctactgctgatgggttaactcaatctggtactatctggactacggttaacatcggtattcaatcagcaactgaaactcaacgtggtactttacgcgttgctacgcagtctgagacgaacgcagggacattagatacagtatttgtcacccctaagaagttacacgctaagaaagcgactgagagcgcagaaggtatcattcaggtggctacggctgctgaaactaccgctggcaccgttgcaaacaaggctgtttctcctaagaacttgaaaaatacaattcaggttgatacttcatggcaagctaccgatctggtacgtggtactgtgaagctgtctaaggggcttggtacttggtcgggtaatgatgtggctggttctactcttcctgatgatggttacgcctctgtaggtgttgctgtttctccttatgaattgaacctgacgctgaaacattatctgccgatcggtgctaaagcggttgatgctgataaactggataacctggattcttcccagttcattcgtcgtgatgttaatcagacggttaacggggcattgactctaacgaaagcaaccactgtacaggctgacattaactcaacagccgacgcaagtttccgggtaatgaatgttagtggagatctgaacgttggtgatggttcatcgatgggtaaacttcgtttgaatggtggttcatctaacgactggtcaattcaagcaagttcagcctctgggcgtattgcaatgatctcaacgggtaatactggcacagttcatctttctgtgtataatgatactcgcggcgttgtagctaacgttaaattccaggctcctgaaattcaggcgattagcaaagtgactctgggtaatgatacagtgatcactgctgctggttctgttctctctatgggtactaaaaataagacaactaagatcctgacttctgatgctggcaacatcgtagcggaagaatctgcgaactcttataaagtctttactgagaagaacgcgcaaaccttgctgaatcctacgtatgtacgtaaagcaggtgatacgatgtctgggcgcttgacggtaagcaacagttcaattatcattgcaggtcaagcggcttggtcaacgctggatgcagtaacagaagcatccaggggcaactggacggctgagatcacagcatcggcacaatacaacttgcttcctggttatgcggttccggttcttgaaccagatccgattaatccagaaatcatgattgtgacccgttatacctatgttaaagcaccgggtactttaacgcagtttggtaacggaactgcattcacttatcagatttgggcacctcgtccgacctctggtactggtgttaatgcgctggcgcaatccttctggatccgtcaaatgaacccgatcacgggtaaatttgatgagtggggccgcatgtataccagcaacaacccgcctactgctggtgagattggtgcaacgtctgctgttggtactacggttaaaaacatgactgttaccgattggatcaaagttggtaatgttaagatttacccagatccggttactcagacagttaaatttgagtgggtggcataatgtcaaacttaatggcggggttcggccccgattttgtagaaacgcaaattctatcggaaacaaacagcgtaacttacagaataaccgcaaaggcaacacatcccaatgcggttcctaatcagtatgagtttacactaaatcaaaaggcggtagggacaccgcctagtgttgggatcaacgtatggagaattaacaatgctgtagttgatccaattaaaaccttcacattatcgaatgataattcagcaactgcaaacaaagcgtttgttgaatatatggatgctcaaccttctgggctgtatttgataatgactaacggtgaatacaaaacaagccaaatcgttgatgattggtttgctaaaaacagatccgttatgtggcaaggcgctgatttcgctcagagattcccaaattctgcatatgttgcattgtatggggcttcaaaatctcgtatactgattgaatcgttttacgcgaacgatggagttttaaaagaagattcacgcgcatcaatcgatcttgtctatgataacgttggtgatgttgggcgaactggtgtacctttccgatctgttgaagatacggaagaatacaattcaaccaatggatctgaatataaagtatatcctgttgcaaacccagtgatctctaaactggctgattatggtatggctcctggattagctatgatgattgctggtgatttttacgccagcaaagcattattggatgctggatcaacaacaagggttactgttcgatggtttacgggtactgctcaaacttcatcatcggtgattgaagttcctgcaaataaacctgatgagtggttacgatttgaacaattctatacgatccctagtggttgtgatggatttaacgttgctgtatctcgttatcctaaacccgctacggatagtttatctgcgatccgtaactttgtgatggttcaggtatctgctgccgaagctgatcaaaactttgctgcacagtttggggttaacggtatcagaatgaacaacatgatcgatggtggaacaccgtatatatttgaattgcctaatactaaggtttatccaggtggtgattattctgcttccgaattccgtgaagttgatgcataaacaaaggcccagaacatcgggccttataaatatgtaaaaaggggttattatggcagatttaaaagctggttctacagtcgggggtttacctatttggcactccggcacatttccgctggttccggttggtaatactctaacctatcgcggatataaggtttatactgaaaacgataaaccacaagcatcaaataacgacttcgtttctaaagcaagcggcggtcaatatttgggtgtagttgcctttaaacaggggctacaaattaacgctactttcacaggcggaagtgaccagaacggtttatattctggtgatggtgatggtgcgacattatcaaaagccaacatagatcttgtatcatggtatggtattggtattcgttcatcttccggtactaatggtcgcgtattagtcatcaacgctcgaaatggtgatttaaacactcagggtaatatcacggttgaaaaacaaatcagtattacaacctctaaccctactgacgcaagtcatgcaacacgaaaaagttatgttgatggtcagataaatactgtcacaacaaatgctaatagcagggtattacgcgctggcgatactatgacagggctattaactgccccgcaattcgcgagcacaggcgcggcttcccgtcccgaacacgtaccacggctcgaccaggtaattactaaagggactatcatagattttggatcttattaaggtgaaacatggctgatttagcaaaaattcaattcctacgtagcacagttgcggggaaaacacctactacaagtcagcttgcagatggtgaactggcgatcaatatggctgattatgccatttacacgaaaaatggttcttcgatcgttcagttagcgggtaaaggtatcccagaaacaaataccaaaaaattaacagtaaatgggcctagtgctcttaatgataccgttaccgtagcggaaggtaaaactattactttcaccaacgcggatttgagcgggggtatggttcgtcatatcactggtaaaaacgcgcttaatgatggttggtacatcggttctggtggtgagagcaataaagggtttttagaaatcggtacaattgatgacggtgatgaagagatccgtttcgtttcccgtggttctggtgatactgttcgtcgtactctgaaacttattgattccggtggtaacactcgcgtaccaggtaacatctatattgatgaagctatgggcggtggtggttctgcttttatttcaaaaaacaaagcatatttcggtgctggcggtgctgatatctatatgcgtaacactgctggcggtgcaacaaatcagttaacgatcactgatggcggtgaattgctgtttcaagcaaaacctgtatactgggacggtcgtaaaccgactttaaccgaattggggatcggtcgggttgaaaacgcgcgtcaacttgagcaagataatttccctgtaactacaggcaacgaaactcgttggattaaagttgctctgttaaaagatcctggcttaggtcagagtcgcttgcaactgatggtgactaacggtggtaactatggcagtacgcgcagttctattgactttatcgattgtagcgctcgaagcattccatcgacattaacaagcggtaacgttcgttcttacctgcaagttcgacgtttaggagatactgcaattgattatactaaccagatgcgttatagcctggttcgtacctcagaagggttagaactgtggtttactcaacgcgcattcattggtggtgttaaagttgctctgctgtctatcgctggcggtgctgctactaaatattatctgcctactggttacacaatctcttcaactgctccggaagggttagttgagagtgtggttattcgtatctatgacgaaatgaacaagcctaaccttgacgatggtactgatggtattctgtctgttgctaaaggtggtacaggcgcaagtacagcctctgctgctcgcacaaacttaggtttgggtacggctgcaacccgtgatgttggcgaaggcgatggtaatgttctcgaaagaggtgcatttggtcttggtggtacggtaggcgctggaaatattgcaaagggttctttagcagagaccgttaagtatcttaatacatacggaacatgcttcttcagggtagaagataacattgctacaataccacagtattctcctagcatttatgttaaaaccggaagcaaccagttaattctttcagctaaccacagaaacggtgttattagtgtcatcactacggataaagttgatggtactaatttaacagtatctcaagtatatactacgttgaataagccatcaccggctgatgttaatgctgttgctcgtactggtgatacaatgtctggtgatttgcttatcagtaaagagtcacctgggttatttttgaatgccactaatgataccggaaactctgtaatttggtttagaaacaaaggagttgagacaggtgctgtatgggcaatacctaacaccgagtcttcgggtgaggttcgaattcgtgctagaacgactgctggggtcacaggcggcgagttcaaatttaaatctgacggtacatttacatcacctggtaatatcaatattactagcggcgctttcaacggtaaaagtgtcaatactcagtatgcgaactttaataacacaagttcaaccacaaccgaacaaaccgtttctattagtggttcgcagcacactccgctgttactgaatagaccgactaactcgaacttgtctatcgggttcaaactttccggaatgaacatgaaacgtttgggtattgatgtaaacggtgatattcgttacggtgaagcagaaaaccagacacaaaacgcatggctgttgtcttcggatacgataaacagatggactgttaacttcggtcgtgatattaacgttgctggtgtggttaattcaactggtggatttactggccctgttactgcatatgatttgactggggtaactcaggatcttgacgctttaacgttgaattataccgaaccaggtcatgttaaagtttattcgtgccgtagcatgggtggcggtgataacatcaccaataaaccttctggcgtcggtggtaactttattgttatcgttgaatgtctccgtaaagtgagcggtactgattacactaaccgtcaagtattacgcgcatcggacaatagccgcagttgggaacgttggttaactgttagcggtactactaaagcatggacaccgtggagaatgaacgttgttagcggaaacgatgatgatgtatcatttaaatctgttaccacgactacaggaaacctgaacagcggaaatgatctgattgttgctaacaacgctcgcgtaggtggtaacttagggttaggtggtgcttcttccacgaaatacgctgataaaggtgttgtgattggcaaaggtagtgctctgttagaaactactgatggtcgtgtgattattggtagttctggtggtggtaatgctgttgaattgcgtcctggtggcccaactcaaaccaacaacaggatcaaagtaactgctacctctggaagtggtggtgatactgcgatcgagtatgaacaaggggcgaaaattcgttctaataacggcggcgcgttgattatttctgctaaagcaggtcaatcaatctatctacgaccgcaaggtgatgcatccagcacaaacgaaacccgtattgatgcaaacggtagtatcacgattaacggcaatattaacgccaacggtacattaacttgtactggtggtgctgttaacggagacttgactgtatcaggaaaagtagatatcactggaaaccagttaaaaactacatcgctttgggctactggagatgctgctgttaatggcgctttaactgttggtggtaatgttgttagtaataccggtattggtagctttgttggtgctgtcgatgttaaggcccctgccgcagataatggtacaacgcacctttggttccgtcattccaacggcggtgagcgcggtgtgatttatatgccgcgtgacaataataccatgatgggattaagagctggcggtagtgagtggcaattggatggtccgacaggtcaaatgctaggaccaggagcacggtggagaattcattctgatggtaacctacagggtgatgtttacggtggttatatcactaactatatcaacgataggtttaaccaatgtgctcaatgggttcgtactggtgctcaacaagactttggtccaattggtcgtccagcacctggtaaaactgttcctggtggttgggtgcttgttggtcttaacggtaacagcaacgaagctaaccagaacatgcaacttatcggcggacggttacaagtatggaaaccgggcgttcaatgggttgattctgctacttgataataaggggcttcggcccctttaaacttaaaggtaaaataatgattgttaaacaaatgaaaggtattaaatggcatcacaattttgaaggtggtgcttactatcgagattgtaatgataagtgttggtattcttttagaaactctcttgataaaaattcccatattattatcgttgatgctaaaacaaataagataattaattactacaacggtgaagatcctactatgataggtttgtttgctgataaagaaatgattttagatgtatatcagatcgacgattttcctgttgattcgtgggatgaattctcaaaaaggaagttcgaatttatcgatggcaagaccataatgactaaagatgttgaagttgaaaaagaaagaaccaaagaagacatactggcggatctaatcaagctacaaaaagaattagaatctatgtaattttaaaggctaccatacaggtagccttttttgttgtatcctaaatatacgtatagtaacctaagaagagtcttataaaatggctgagagaaatcccgtagataaactagccttatttgatcgggtaatctcgtttgtgatgggtgtgaaaacatggaaacaattgctgataaaaataattctaataatggttatgtttcttatggtagtaacttggtacaaatggactgatatattcccgatgataaaaggtgcccttgtagtcgatacaagggctatcgaaatggaaagaacagaaaagtttaatcaatccgcgttggaacagttgagcatagttcatcttacttccaacgcggatttttcggcggtactggcattcagaccaaagaatataaactattttgttgacattgtagaatatcagggaaaattaccatcccagatcgatcctaaaaacctcggtggttatccgatcgataaaacatccgaagaatacacgaatcatataaatggcttgtattattcatccactaaagcaagttcctacctaccgacacgtgattttgtgccagtagcttatacttttagttgcccttattttaatcttgataactactattctggatcggttttgatggaatggtacgcaaagcggcctgatataccagatatgaagctaaacatcatatgtggtcaggccgcgcgtattttaggtcgagcgaggtgattaacgtaatgctggtgttaaattgtgtgatcttccaatagcccgtttgattgctttaaagaagttcatcaccgggctatttttctcgtaaatatcccaaactttcaatttgtcccacggatccggaacataatcttcattccttgccgaaacccccaacgtaacccgcctgtatccagcgctgtcgtgataatacacgaagaatggcctacctattggcgcaaccttacaacctctcttagcggctctcatcgcctcatcgaacgtcattgatacccccaaaaatttctatgcatgaatggtcgaattccgatagtttcactcaaaatgaatatcggatgatctagctcatcgtggttttcttcgtcaatgacgatatcccaatcagtagccttttgttcttctaccgtggcaatgaacacctggtttacttcacacttgcggtgtgtacgtctgatgattgtatccccttcacgaaacacaatcatatcagggttggtagtgcggtacgcggttttacccgcgcacacttcattaagcatatcttcgtatgtcattataaaacctttacacgttgaacgatggtttgtttaacgtctttgtattctccgtgctctttaacggttgctttgaaagtgatttcatcaccttcgtttgcaatgttattaccgaagtaaacaacaacattaccatcaacattaattttggtcatgaatctttctacagaagtgtagtaagaaacttgagtatatcccagtgaaatcactttctcaacggttccggtcatttccagacgttgtttgatttcaccgatgtggttagctttagaaatgcgttcctggcgctcttgttcccactgttcgcggatttcttcgcgtttggcgatataatccttctccagtgcaacacccatgcagtaagcgcacacggcgtcaaatacaggactgtttttgttgtcttctttagactggtcagcccaccaaagaacagtaaacattggcatttctgcaattacttcgcctttacgcttgccaatcggcatgatccctttttccagcagttccagtttttcagtatcgaacactgacagtttaccgcgacgttcgaacagatcgaaatctgcaaagccctggaataccattttgaaagtatcagtttcagttaaacgggctgaaacacggtcgaaatactcacgcgctttcgcttccgctttctccggatcggtagataagttgcagatatagttatcagaagtataaccgccacctctacgctcaacacgcaaggtatacattgcatttttacgaccagaagaaatgaagtaagtggtagtaactacggttgcgttagtcatggtatttctccttaaagggtatctcgtttcgatatggctaatatagcaaaagcccctgaccgaagtcaagggctttttaatcattcattcgaatctttcattgttttatgaagatgaatatcaaaaattttccagtacgcctttccgcgaggataaatttttgctttgtcaatatcgttgttgcttccccatgtgttgtttgggccacgacatcgattttttatataatctgtatgccagaataagcgctgaaccgatgattccgtacctaatggatcttctttactgaacagaatttgtatactcataagaagaacccagtgcgaacaatcagatcgattttcttttctggttcaaacggtgatttgctatcgatgttacactgatagaacataccaacatacttttcaggaatgttggattcacgcgcccatttcaggttgtcatcggtattcggccccagcatgaggttaacaacatcaacagcataatcctgttctttggtgttgccggaaccgtttacataatgcccgtgggcggttttgaggatctcaattacttcgctatcgtcggtttcgactttgtaaagcgttgtattttcaggaatttcttcaagaatgatcaaagcggttttcatcacacttacctttgtgtttctgtttacgttttgcttctttaaatgctcgcttgcgatcgcggtgagtagaagcgcggttgaaatcatgtttcgctaccaaattattcatataagccccttaaagaaaaatatttaggggctttcgcccctgtattaatccagcaatttgcggatcttgtctgcgatacgtccggcgcgggttgcacttgcagtatgatcgctttcttttgaagccagttccgccagcttacgctgatgttcttcttcttctgcttgacgatctgctgcaacctgtgcaacctgctcattatcgtgagcaatacgcgcttccagttcagacagggttttgtcgaaagttgctacgatttcatctacagaacgaattttattaaacagtttcataatttatctcaattggttagttttaatcagtatacatcaatatggttgaaattcaaaatcataaatgtcattcagtgcgcggttccactcggtgtagttttcaccagcaccataacgcatttgaatagcactttcgaacgttgatccgttgaggttcgggaaaccgaacaggtttttgattttgtcatgtgctacatagtacaaagaagcactttccagcatcgcaaccatcgcagacggttcgtgttcgcggcgcttgatacgtaacagagtacgactagcaccagttttacggcgttgatttggtgctacgtagaaacggaatactacgcgccctgttttatcatcaactaccaggtaaaacccgttttctttcagatccacgccttcgaatttcttgaaggttccgcgtttcatgtcaccaattttaattgcatatttgtgaatgtcaagtcttgtcagaattcttttcatattttttagataccagtttgcctaattttgtaatttcgcctgtttttacgttaacaaacaaggcgatgctcagaaatgggatgctaatcactacgctgatcaatgtaaacagaaaacgtatcacaaaaagaacagcacgttcaagatatcgttgcatccacgcgattcctaaacaactataccctactataaaggtggttgcaacataaaatgcaccaaatcctttacgaaatacgtaacctttcccggattctatccggtcgtcggcccacatttcacgggcggttttgagaatagattcaccactagcgcgggtttcgttagccgaaggcatgtttttaaatttcatgatagtctcctatgcgcccagaactctccgggcgcggttgtttag

SEQ ID NO: 42 - DNA, 45812 bp, unidentified
  source 1..45812: mol_type = genomic DNA
atgggggaagaaaaaagcgctacgcagtggctgcgcgtttttattctccccaccatgccgtataggggtaaactgaggcagagccacttgaaagaggaaaacaacatgactgataaggtgaaggtaacgacacctcggaacccagtcggcagaccaaccagctacaccgaggacatgccggaaaaactccttgaatatttccgtgtcgacgttgatgactatatccagcactcacacacgacagccgggaaaagcaacattcgcattaacccgaagcacatgccgtctattctcaacttctgcgagagcatcggcatcacgacgacgacttttcacgactggcgttcgaagcataaggaatttgctgtcgcttacacgcaggcgcgcgagctttacgagcagatgattctgaatattggcttcgccacgaacagtactttcgcgaccttcatgctgaaagcgaacttcggctatcgcgacaacactgagatcgtcgtgaccggtgacgccaacaagccggtgcggttgaagatcgtcagcgagcggccgaaagatgagaagccgcgcgaggagtccgaagccgtcgactggggtgacgactaaatactgcttgacatatctatgactgcgcaggaatatgggggccgggcaatcctgccctcactgcacaggacatcaaaatgactgaatcactgaaattcacctccccggcaccggcaccagttagcggcgttctcgcttgcgcttcccgcgaggcaggtgcagaaaataacctcaagctggcgcgcgccatcgtagtcgaggtcgcagaccgtggcgctgaccagcacgtgaaaataaaagtcggcaccctgcttgccctggcgctgggccttgatggcgtcatgaaggttatggcgtcgctcgaggctgatcgcgacagcaagatcaaggcgctcagcgagtgggaagtgttcggcgtcgaaatgcttgagcagaagttcaagtgcctgccggtggtcaacatgaagccggaagagaagcgtaagcgcattgccgctggtatcgacacgctaactcagcgactcgacgagcgcagcgaagacctggctttagtagatggacagctgaacgaatggcgcacgcacacccggcacatcctggatacctacttcgccacctgccccaccagcaacgccaacgaccggaatcttcgcctaatcatgaaggcggctatcgaaagcgcacacaacaaaaacaagcagctgaacaaggactataacgccatgcacaacagagcctacgaatcagaccagctgcggaaggccgcagagcgggagcgggacgacgtgatcaacctcaaccgtaacgcagcggaagagatccagcacctgcaaaagcgcaacgagcacctcgatcagactgtcgtagaccttgtgcgccagcgcgataagaacggccagcaggctaaccagctggctaacgaactggtcgagaaacgcaaggagatcagcaggctgttagaaataattgaccgcctgcacgcagagatcacagagaagcgcgacatcatcggcgaagcaacgctgcgctgcactgcgctcaccaatgacgcgaaggcgatgagcaagaataacagcgaactcgcagcacgcctggctaacgttggtctggagatcgccaactataagcagctcgtggaagacctgaaagcaggaacggcctttgaccgtggcacagtgaagcgccaggcggacaccattgatcgcctgtatggtcagctcaatgagtggcacgactgggctacagacgtcatttgctgcccgtcatcaatgggcggtgaagcgctgcggactgccatcaccgcagcgatgcgcaagcgcaaggagcgaattgatggtcaggagtcggccatcaaggcgctaactgtgcagcgcgacttgtggttgcagtgggcgaagcagttcaccggaaaagacaatgcaagctggtctgaactgttagatctggtgaaggcaaaagtgaagtcgatcacagagggaatcgacgggccagcggagcacaccatcaaaggcacgctgaaagtcacccagctgaaaggggatgtcgttgccagcgatggaagctgggctatgctcaaacacggcaacgcggtaatcgctggaaacattcccgccagcaagctgaccctgggcgaggagatgaaagaggccattcgcgaagtcgtccgggaggagatgagcagcgcgttaaagcaagccatcaagaacgaacttgataagctgaccatgtaacccatcaaatcattaaccagcggcccacgacgggccgcaatgaggtgaaccaatgcagaccttctacccagtctttagcgccattctgtgcatgttttgctttctctgctgcaaagggtgggcgacggccctggacatcggagccggggaagacaagcgtatgatcaggatggctcgcaccttcgacatcgctggcgacgtgttccgctgggcgtgctggctgttcatcgtcgcgggcttccttcgcaccctcggattgttctgattgcttacactttgtaccatttgcccggttgatcaccgaagtggctgactgataggctttaatgatactcgcagcgaggtggaaataatggggatcgtaatgggtgtgtggttggcgctggtgacagctatcgcgatgatcgcaattcacatggccgcaatggacagggagcggctcaaggccaacccggtcagccagatcaccaagctggtgctcgcggtcttcctcctggtcggcgtagcgcacatcgccaccaggtacacagctttcctccgcgtgctatcctgacctgacaactgctatcatggccccgttaacacaacggggcttttttatgtctatccaatctgacgccagtcaattcattgacctgacactcacaccaccgcagaacgactttctgcaactgtcgtgcaaacacccggccttcgtggcgggcttcggtacaggcaagagtcagaccatggccgtgtcgtccgtgcttgacgcatcagagggtggcgcagatgccacgatcgctatccttgagccaacgttcgacctgtgcaagctgatcgccgtgccgcgtatcgaacagatcctctccgagctgggcattcgctttaagaccgtcggcaacaaggagatatacacctcccacggcgggatcggcgacttcctctttcgctccatggacaacccgactcgccttgtcggctgggaggcgttccgcgtccactgcgatgagatcgacaccctcaagaaagaggccgccaaaggggtatggcgcgcagccatcgcccgctgccgtcagtcaccgaaggagtacgagccgttcgacttccttccgtcagaccgcccgctgaacagggttagcgcctactgcacgcccgaggggttcaacttcctgtatggccgctgggcgaaggacaaggagcgcagccgaaaggccggttatctcatgatccaggccgccacctcatccaacccattcctgcctgccgactacctggacgccctgcgcgccagctacgacccacagcgcttcgaggcctacgcgaaggggcagttcgtcaacctgaaatcgggcacggtctataagaactttaagcgcgagctgaatgacaccgacgtggagatcatcccgggcgagacgctgatcgtcggccaggatttcaacgttaacaagatggcgacagtcgtctacgtcgagcgctatggcgaggatggccttgccgaactgcatgcagtggatgagcgacacaacggcatcgacacaccggacgtcatccgctggctggtcgagaagtaccagaactcgggaaatggctacatccacccgatcgaggtctacccggatgcgtcaggcggcaacaccagcagcaagaacgccagcatgtcagacctgtcgatgctcatgagcgcagggttcgacgtctactgtgggcaggccaaccctgccgtgaaggacagggtgatcagcgcgaacaccctgttctgcaacgccagcggccgccgtcggctattcgtgagcagcaagcgctgcccgcaattcgtcgaatgtctggagcagcagatctacgatgacaagggcaagcctgacaaggaggccgggaaggatcacatgaacgacgcaggcacctacccggtggtctataagttccctgtcgtgcataatggcacgatctcagcaaataatattgaatgggtacgatgatatgacgatcacgacactgccgcaggcggggacggtatccaccgaacacccgctttacaagcggtttaaccaggaatatcgcactatcgaggactgcgttgcaggacagacggtcatcaagcgtgccggtgttctgtacctgccgaagcccgaagcgtggacaatgaagcgttacaacgcttacaagcgccgcgcccacttcctcaacgccacctatcgcacgcagatgggtatggtcggcatcgcgttcgccaaaccggccacctacaccttgccgacggccatcggctacctgtcgaccgacatcgacggcgaagggctggacatggatcagctcgttcgaatgtgcgtggcgcagaacatcaccttcgggcgcggtggcctgctggttgactatgactcaccggaggacgtcgggcaggtgactacgctggtcaatagtggccgcgtgactatccgcatgttcgaccaccggcagatcatcaactggcgcaagagcggcggcaaatattcgctcatcgtgctgcgctacctggacgacgtcgactatgacggcttcgagcactatcaggtggttcgctaccttgagctgaggttggtggatggcaaggcatattcccgcctgtggacggacgaactacagggtgccgccgggctgccttcctcggtcattcaacagaacgggaacatgaaccaggagcagccggaactgcgcccgatcatggctcgcggaaagcagctcgactatctgcctttctgctggttcggcagcgagaagaacgacagcgacattgacccggctccgctgtccgacatcgcgaacaccaatatagcccactacaacgccgacgccgacaacaccgacagctcgtttatctgcggccagccgaccttcgtgatcgccggtgtgccgcagaacttccagaaggacaatccgagcattaaggtcggcggtgacgaagcgatcattctgcaatccatgggcaccggcacgcctaccgccagtatggttgttgcaccaccgaacaccccggccgccgcgctgctggagaagcgtgagaagcagcttgccatgctgggcgcgaagctggttgagcgcaacggggcaacgaagaccgccacccaggctggcgcggatgagaaaaccgacaactcgatcctctcccagtgcgtcggcaacgtcgaggcggcgttcaatcaggcgatggagatggttaaagacttcactggcaccgaaggcgcgaacgtccacatcaacaagcgatacgaagatatcgtgctgaacccgaccgaactgacagcctacatggcggcggtgcagtcagggatgatgcgtatgatcgacttcctcgcgtggcagcagcgtatcggcctgatcccgaacgacgcagatctggaagacgttgaacaggagctgaaagacggtgccgaagaaacgcagctgatcttcaacgcggctgctcgccagacccagcaggggctggacaacccgcaggaagataaagacccggaggaagataaagacccggaggaagacaagccgatctctaagaagaaggccagcgcgccgaagaaggaggctaaatgacatccgttaactcgcggatggcgtcggaggcggtaaggcaccgcctctacctctaccgctacagcgaaggccaggcgaagaagatgacccagctactgcgccgaatgtccgtggacgtggtcggccgcctgctgtacgcgctggacgactcaaagatctccgccgacaactacacggtgaagcgtcttgaggccatcaaagcagccattaacccgacgatcaaccgcatctacaaaaccacctacggacagctcaaagccgaccttgaggcgctgagtaacggcgagctggcgtaccagtaccgcacgtggcgaacgctcatccctaacccggtgcttgacttcgtgggcgggctggtggagatcccggaaacgcaggtatgggcagcggcgaacagtcgtccgttccagggcatgcttcttcgtgacatcccgtcagtgctgggtgaggccatgaccgactcgatcggtcgggcggtgcagcagggtatcttacagggcgagacgtatgaccagatcattcgacgggtcaaaggcagtgcagcagcggcctacaaagacggggtgatcggcaccaacgagcgccaccttgccaccgtcacccgcagcgcagtgtcgcacgtcgcagccgaggcgcgggacaagatcggcgaggcgaacgcaccgctcatcaagtcagaacagtggctgtcgacgctggacaataagacgtcgaagctgtgcatcatccgcgatcagctgctgtacatgcgggacaagaagcacacaccgatcggccatagcgtgccctacggcgctggccctgggcggctgcacatgaactgccgtagtacgtcgaccttcgtgttcaagagctgggaggaattgggcgttccgggcgtcaagatcaagggcgcgtcgcgcgccagcatgaacggacaggtgccgatttacatggactattcgagctgggtggagcgccagcctatgagcacgttaacgcaggtgttcggcgtggagcgtgcgcagctcatccgcgacggcaagatctcaccgcctgacctgttcaacgacaagggggagtatttaacactcgcccaacttcgcgaccttgaccgcatcccggcagaagactaacatcgtgccgttgacaacacaggagctatcacatgtggaaatatctgattaacaaagaagcgtttgacgccctcacccctgagcagcaggccgcatacaaggcagtcggtgattctggcaactatgtgatgaacatcgaaggcatgcctgacgtgcaggccatgcagcagcagatggccgatcttcaaacccgcctgggcaccatcgacgcagagaaggccgccgaagcagagaaggcccgacaggcagcgcttgacctggcgaagaagaacggagactttaagaccatagaagaggactataagcgccagatcgccgacctgaacggcaagatcgagggcttcggcaagcagcgacgcgacgacttcctgaacgcgcagatcgataagctggccgcagagctgggtggcaaggagtatgccgcactgttcaaaccggcgttgcagcagcgcctgtctgtcgagggtggtgaagatggctccgacttcatccctcgcgtgctgaaagacggcaagccgtcggccatgtcactgaacgacctgatcggcgagttccgggcagacccgacttacaagccggtgtgcgtagcgcctgcatcctctggcaccggccgccatcaggcaccgaccccgacgccttctgcttccgacaagctcccgagttttgaagatgtgcgcggtaagcagctgagccgcgcagaacagatcgcggcaagcatcagcgacgcagagtaagtaagcacaggcccggcaatgccgggctttttcttgcttgtccagtagttgccggttatcatccagacgtttaatcactcaaaggacatcgcgcgatgagctttactatcttccaacgaaaactgatcggtacgaccgttcagcttctgactgaaaacctgaacgtgttcaacgcggcttccggtggcaccatgcttatcggcagcggcgaggttatcaaggaaaccatggagaaaatgaccattgggatcattgacggcctggtgcaggatcgcaacgaacacgccccagttaacactgtggttcagccgaaggtgctttcccgcatccttggcggttccatcaactccgctggccgccttgggccggtagccatcacctccggccagctgcgcctgatcgagactgacgtgaaccgcgcggcagccgagatcgcaaccctcgcgtcggaagccatgctgaaacgctacgtgaccgtggcaatgggtgctggcgtggctgcgatcgaagcgttcggtcagggtatctatacccaggacgcccacgtgaccagcaaggccggtgaactgtatccgaccgtcgaagacttcccgctggcggcgtccatcttcggcgaccaagccgacctgattcgcacctggttcatgtccggcacccagtgggcgaagttctccgcccgtgaagcggtcaagtccgccaaactggtgtttgagctgggcaacatgaagatcttcaccgacggcttcggtcgttcgttcgtggtatccgacgcggcaagcgctggcatctccgcggcgacctccggcggctccgcgatctacgcacctgatcaggcgatcgtcggtctggcggcaaacgccatccaggtcaccactaccggcctcaaaatggctgctgacccggccaagctgggcggcgagaacattgaaagctggtggcagggcgagtttaactacggaatcgccctgaaaggcatgcgtcctaccctggcgttccgcaccgccaccgaaggcaagaaaactccgactatggccgacctggtcaagaaagagaactgggaagccgagaagggcgaaaccgaccgcaagccggttggcaacgacgccgatccggtggtgccgactcgcaacgtgcgcgagacgctggggatcattatgaagctgaccccaactaccatcccggtagcagaagctggtaattaagcgaagaagtgaatagcatgggggccgattggcccccttttcattggagcaaaatatgatcggcaatctggacgacctgaaagcattcgcggcggccaacggctacacgggaatgactgacgaggagctgagcaccgcgctccgccaggctaacctgtggctgtggtcactgtcatggaagggcgagcaggctgaacccggacaggcggacatttggccgcgcactatctgcgacgactacaactgtctcgactacgacaccccgccggaagttctccgctttacttacaccatcgtgtgcgacgccgtcgactctggcacggagttcaacaccgcatcggctggcgcgcataagaaacgcacccggatcgagggcgcgatcgatgtcgagtacagcgagcagagcctatacagcgcaggcttcgaggctccctacatgatgggcatgatcgggcactggctggaaggcaacgggcgcggctgtaacgtcaagatggagcgcggataatgaacaagctctatcgcgaactgcgggcagaggcccgcaagctgttcaaagagtacggcgcagtcatcaccatcagcaccccgggcggcatcagccgcgacccagtcaccggcgaggaagtggtgacgccaccgggcgcggtatgcaaggtgctgggcgtgatcaccggcgtcgacctcaagttttgggggctggcgaccatcccgccgggcgagcagcagatcgtcatggcatggacggacaccaccgggaaggagtgggagccgaagatgaatatgaccgtctcaggtggcggccgcgcttactccatcaccgagattaagccggttatccccgacggtggctacggcatcgtgtacaaactgaggatcaaggggctgtaatggcacgcaagcggaacggcacaatctttgccaacaatgtcgctcagtgggctggcggcgtcgtcgagcgtcacgaagagatcgtgcagctggcggcgatgaaggtcttcgcgatgatcatccagcgctcgcccgtcggcaaccctgacctgtggaaccgcaaccagcaggccgtcaaggagcgcaaccgcatgagcgacctacgaacggccatgcgcgaaagcgacactttcggctacacgaccaagcgcggcacccgccgcctcaagccgggcgcgaacatcgttgcagcaccggcgaaattctcttcccctgtcgggccagtcggcccgcgcatcccccgacttctcaagaatgagcagggcgtcaacccggtcgggaagggctacgtcggcggccggttccgggctaactggcaggtggggatcgactttgtccctattgagtggctggatgaacgggacaagtcaggcaccccgaccatcaacaaaatggtgaacgccgtcgagcgcttccgcgtcgggatggctgagcatatttatttcgttaacaattcgccgtatggctacccgctggaatatgaggggcactcacgacaggctcccgccgggatggtcaggatctcatgtatccaatttgaggaagcattcgcggcagcaacagcagaggcacaaaaattatgatcagcacttcacagattcaggcaaaattcgacctaatcgcaatgcagtgggggaataacaacaatatcgccctcgtgtggcgtaacagcgccgataacgacatgaacgagcaggcagtgagtcagctggtcggcttcccgcagcacatcccggccccgtctatctccatgggcttccagcagtcagacatagcgaagcgcgggatctaccaggttatgctgcgtgctcctcgcctttccggcacccgtcagatctacgacgcggccgacgcgctggtggaggcgttcaatgaagcgatgttctatgacggtaattatgttagcatcggcgacgatgatcggcagctataccttacggcaccggctgaaatcggcgctgactatgaagacgacgccgggctgcatgtggctgtcacgatgaactaccgtatcaacaacgtaagaggctaacatggctacgaaactctcctacaacatcccgaacggctccacgctgcaaatcgctcagacgatgggcgcaagcattgccatcactggcgtatcaaacgagaaggaggctatcgccaccctgtcagcagctgattctagcctggccgcaggcgactacgtgcagctgtttaccagctgggtcaatatgaatggcctggtgtgtcgcgtgaaatccatcgccaccaataaagtgacgctggagaagatcgacaccaccaacaccgacatttacccggcaggtggtggcgctggtacgttggttaagattcaggcgtggatcgaccttccgctgacccctaccatctccaactccggtaacgagcagcagaccaccacgttccaggctatccagcacgagcgcgcggtgaacatcaacacctataagtcggcagcgacgcagactttcaccatggcgcacgacgccagcgcgccagtgcgtgatgtgctgaaaaacctcgaccgcacgcaggacatcaccgcgttcaagttctacaacaagcgcgcgaaggaaacccgcgtttacggttgccaggtctcctttaacgagatcccgacctccgaggtgaacaacgtcgagacgaacagcctcgttctgagtctggtcagtgagatggtgatctatcctgccgcgtaaagcgtgctatcatcagggcggcttaggccgcctttttcatatctggagataatagacaatggctgcaaaattcaagttagtacccgctggcacgttcgaacttccgatcctgatcaccaccgtagggcaggatgagcctacagagctgaaattcacgttcaagcgcatgccgctgaccgagctgaaagagaagcaggaagcgatggcgaagcgcgtgcaggagatggatgaggaatacaagggcaaaaagctgtccgtcgtcgaagatagcgtgctgcaatatccgttgatggccgattttgtgctggatatcgcaaccggctgggagctgtccgacaagttcacgaaagagaatctgatcaccctgttcgataactacccgacggcgtttatgtcgatcagcgttggctaccagtccgagctgtggaagctgcgccaaaagcactaaccgccgcgattgagggtctgtatttccccgatccgccgcagcagctggtcgataatttcgggggggagctggaagactaccgtccagaagtggagctatcagcagagattgttgatagcttttatttttaccagcgtattgatacccaatggcgcacggggccgggcggtttaatcggcctcgactacaacgtgatccccgtcatggctgacctgtatggcgtcaagttcgatcgcctgctcatggatgacctggcaatcatggagggggccgcgatcagagttctcatgagcaggagtgatacagcatgagtgaaaacacagaacgcttgatcgtcgacgtcgacgccagcggggtcaacgcgggggcaaaatccctcgcagaccttgttgacgcggcgcaggacgcaggtagggcagcggacgggctgggcgacaagttcgaccaggtgaagccgtcagccgactcagcagccgcagcggtcgacaacttcaacaacgaggcgaagcagacgcaggaggctgctggcgacgctgccgtggggctgtaccggcagaatcaggagcttcaaaacctgctcgaccgcatcaggccaacgcgcgttcagcttcgtgacctggcgcagcagcaggaggcactggcgaaggcgcaggctaacgggctgctgggcgcgaaggaagcggaggagtacaacgctatcctcgccaaccgtgccgggatcatcgaccgcaacgacgctgctatgcgcggcctgaatgtgacgtctgagaagcagaagacgctacagcagggattaaccatcactaccgggcaataccgcgctgctatgggtatgttaccggcgcagatgaccgatatcgtcacccagctggcaggtggtcagaatccattcctgatcatgatccagcagggcgggcagattaaagactcgttcggcggactgggcaacaccttccaggcgcttaaacaattcatttccccttccttcctcgggctggctggcgcgacagcagccatcgctgcaatgggttatgcagcctacaccagcgcagaccaggccgatcgactcgctgcatcggtgacgctcatgggtggggcaggctttaagtcggccgaagagctgaacagggccgccgtcatgatccagaagtcaactggcgacagcattagcagcatcaccgaccggctgatcgagctgaacaacaagggcacgatgacagccgacatgatggagaaggtggcgatctcaacgtcgaagttgtcagatgccgggctggacgctggcgacgtcatgaaagacttcgataacctggtgaagaacccgatcaagtctatcgccgcgctcaatgagcagtatggtttcatgaccgaagcgcagatgaagcacctaatccagacgcagaaggagaagggtgagcaggctgctgctgccgaagcgctggacatctacacaacggccatgaataagcgggccgatgacgtgatcgagaagactgataacgtcggtcaggcatggaagacgctgaaaacagccgcgtcggatgtctttaacgatatggggatcgtgctgcgctcgtggggaaaccgagccgtcgacatcttcaaaatggtcaagctatcgatcgacgacctgctgaactatcttgcgcagatggacagcaaatttacgctgggcgttgctgacctgctggacaaggtgccgggcgttgacggtcgtggcgttctccgggcgatggggatcgacgtcgaaaccgtcgagaagaatggccgtgagtccatcgagaagggcaagcagatcgcgaaggagttcgctgaggtcagcaagcgggcctttgagagtcaggcagacgctgaggcgcgggcgcgcaacgccaacggcgctaccggcagcggtgctaccgatgagaagagcagggaagccgtcagcaagctggcgagtgagtcagcgaagcacaacaaggagaaggccgtcaccgttgcacagggtgatcgcatccttgagcagtatcaggcgcaggagctggcattacgggcgcagatcaagacgctgaaagaccgtaacgccttcgacgtcaacgcctccgagcagatgaagaactatcagctgttagtcgcgaagatctccatccttgagggcatccgggctgacgccaaaggccgggcactcaccaaggacgaacagtcacttcttgcgagcaaagaggagattctcgcgaaggccaagaccgtcggcctgctgggcgatcaggtcaagcagctggagcggcaggcgcagatcaccgatgaactgacccgcagcggcaatgacctgtctgttcaggtggcggccattaacgcctcatggggaatgtcagccgatgagactgcgcggctactggagaatatgcagcgcgcggcggccctccgggacaaaggcgcgactcaggagcaaatcgacgaggatgcacgccagcgtgaagcgctgcggcaggctaccgacgcgaaaacgcaggactgggcaggcggtgcacgctccgcgatcgaagcgtggggtaaggatgccaccaacacctcagccaacgtacagaaggccatcactggcgcaatggatgccgggctggactcgatcaactccttcgtgatgaccggtaaggcgtcgttcgccgactttaccaaatccatccttgggatgatggttcagataatcaacaaatggctaatgttcaaagccatccaggggatcggcggcgcgatgggcttcgatatgtccagcatcggattcaatgcgaagggtggcgtatacgacagcccgtctctgtctgcgtacagcaaccgcgtctacaccacgccgcagctgttcacgtatgacaagccgaagccgtttgcgaagggcggggtgttcgccgaagccgggccggaagccatcatgccactggcgaaggattccagcgggcgtcttggtgttcgtgctcatggcggcgctggtggcggcgtctccatcgggtcgatggaagtgaatgtcgaccagaacgggcaggctacggccaacgtgtcagagtctggcaagctgggccgagcctacggtgatgcaatggccgcagccattcaggacggcatcgcccgggcaagctccccgggtggacagatctggatgcttattaacggtcacgcgtgataacctacagcctcccacacaggaggctttttttatggctacattagacgcgtggatctggccgctggcggcaggtcaacaggtatcagtgaaagaccgcagccgatcgaacagcttcggcgacggctcacagcagaacgttttagaaggcatcaatccgttcattatggaggtgccctgctcgtggactggcaacgccaagaccggcaaccagatcctatccttcctgaaagcgcacatcaccaacccgttccagatggttccgccgcatggcgaactgggcctttacaccgtgaaatcaggcacgatcaaatatgtcgcgctgggacgtgcaaccatgaacatcaccttcacagccgagcaggccgtgggcatctacacaggggtgaaaggatgagcaacaccattttcgacgaagccacaaagctcgacccgtcgggcaagatcattctcatggagatagacggaaccgagttcggcgcggggatcatccggggccactattgccagctcccgcacacgagcaaggagatcctcgacagcgcgaacagcacgttgacccgcgatcagctgttcaactgcaaaagcgccaatacgcgcggcaccgtcacgacgaatgaagaccgtaacaccatcaactttaagtcgctgggcgtcgactcgaacctggttttgcctgagttctctggcggcctgactggtggcaagtatcaggtgatcgaggtggttggtcgctgggtgactccgccgccatcaactgacaaccagtatcagatctactacaaaaccgcagcgcatgatttttctcccggctacaacaagggcggggcgttggcgagcgtaaccgaagatcttggtgatggctggctgaaattctcgttcgacatgtcgaagctgagcgctggcggttcagactgggtaaacagccagattatcggcatccgcattgacctgtggcagcaggcagtcggtgagatcgagatcaagcgaatcagcatcctgaacaagaacccgcacgaggttgacgcgtccaagctggcaccgaagtcaatctggttcgacaacgtcgaatatggctattggccgtttatggctgaggggatcgagttcagcagcgagcagcagggaacgcctaccctgtccattggcaaccagtcgggggtcgtcagcgcctacctgcgcgcctatcagcagatggttggggcaaaggtcaagatcatccagacctacgcgaagtttctcgatccgcgcaacttcacagatggtaacgagttcgccgactcaatgcagcagtggacgcagctttactacatcgatcggccagactatgagggcgaagagtatgttcggttcgcgctgtcgtcgccgctcgacctacagaactttcaggtgccaacgcgcagcatcacgacgttctgtcagtggcaggcgcgcggtctttacggcaaaggcctggacgccggggaagaaaacgggtgcagctggaaccgtggcacagctaaaaagtggtacgacaagcacgggaaccaggtggacgacatcacgaaggatgagtgcggcgggtgcattcaggattgccgcctacgcttcggccagctggtgagtgacccaaaagcggccgttctggactacggcggttttatctctgtgcgcctgattgattaaacgcactgtatcgcgttctgcggcgttttcttgcgtaagacgtccgaacgtatggcctgacggcgttaaacgcgatagcgtgccgttcaggcccgtagttttcgattcacgaagataagaatacatcccatagccatatataataaaaaccctcccaagggagttttatttatatggtcttgggtatgtcttatatgtatttatggtaataaatatataaacccataccacctaacacctgaaattcagccttttaaatcaatagcttaaaatttcaggtggtgccaagtggaggcaaaaatgattgacgtaaatgacatcccggaacagcaattaacgtatattaaacaacaccttactgagtgttcgccgcaagagggctgcgggctgctggtgaattcaggcggaggcctagaatactggcctgccatcaactcagcagccgacaaaatgaacagttttcgcattgccccgcaggaattcgctgaggctgaggacgccggtaacatcgttgccgtcatccattcgcatcccggtgccgacggtctggcgtatccgtcaatcctcgatcgccagctcatgcaggaaacttgcttaccgtggttcatctacgccccggacaaggatgagatggcggtattctttgaggagccgaaggggctgctgggtcgtgacttcgtgctgggcgctacagactgctacggcctggtgatggcatggcaccgttcgcgaggcattcagctccctgacttccgcaagccgtacccgtggtgggagaagggtgaggagcttttcacggatgagaatttttcagcagcgggatttatcaagaaggccgaggcagagccgggcgacatggttgtgttccgcatcgcgtccagcgtaagcaatcactgcggtatctacaccggcgacgggatgattatgcaccacctcatgaaccgcaaatcgaccattgataggatgtatggcacctaccttgagccgcgcattactggtattctccgacatgagttactaccggagatcacaccatgggaaaccagctaagcaccatccgactgtacggcgaaatgggggcgcgcttcgggcgcgtccatcacctcgcggtcgactcctgcgccgaagcaatcagcgccctttcctccatcctccccggattcgatcaatacatgcgtgacagccagtcgcgcggcctgaccttcgctccgttcatcggaaagcggaacatcggcttcaatgagatgtcgcagccaatccctgacggcgaagaattccgcattgccccgatcattatcggcaacaagaagggcggcctgttccagaccatcctgggcgctgcgatgattgtcgcgggcgtcgtggcgtcgttcattcccggcgggcaggctgtctccccttacctcgttgctgctggtatctccacggctgctggcggggttatgcagatgctttccccgcaggcgacaggcatgaagatccgggaggatgacgccaacgcgccgtcatacgccttcggccagccggttaacacgacagcacaaggtaacatcgttggcgttttgtatggcgagcgtgagatcgggggtgctatcatcagcgccggaattatcgctaacgaggtacgttcttaatggaaattaaaggatacaagggcgggagtagcaacgtgcatacccccgttgaagatccagactccctgatcagcaacgcaacggtaaggatgctcctggcgttgtcagagggtgaaaccgtgccgattagcgcggaagacctgcccaagcgcgtttacatggacgggacgcccgttcagaacgatgacgggtcagtaaacattccgggcgttactctggaatatcgcaacggcaccccgcagcaggagccgatcaacggcttcccggcggtggaaagtgaaacacgtatcaacgttgagctgaaaaagtcggctgcatgggtgcgcaacatcaccaacaccgagatcgacgccgtccgcatccgaatgaatttccggctggtcatccagcagaaggacggggatcgcgtaggcggacgcattgagtaccggattgaataccgcaaagtcggcgacagcgcctacaccgtggccttcaatggtgctgtcgacggcaagcagaaagacaactatgaacgcgatcaccgcatcgacctgccgaagagcagcactggctggcaaatccgcgttacccgcctaactgacgacagcacgttggataccaccgtgctcaactcagggatcgtggctgtcaccgagatcgtcgacgcccgcgttcgttacccgtggacgtccctactgttcgtcagcttcgacgccaaatcgttccagaacatcccgacaatcagcatcaagatgggcggccgtctggtgctggttccgtccaactatgacccggttaaccacacctacagcgggtcgtggaacgggacatttaaacaggcgtggacggataacccggcgtggatcgtctacgacatcattctgcacaagcgctttggtattggccgccgtatcccgtcctcattcctgaacaaatggacgatgtacagcatcgcacagcgctgcgatgagctggtgacgaacgccgacggcacgcagaaccgccgttacacctgtaacgtgtatatccagaaacgcgcgcatgcgtggagcgtcatccgtgacctggcgtcgatctttaacggaatggtcagctacagcaatatgcaattgcagttcgcgcaggatgcaccggcagaagtccgccatgttgtgacaaacgacgacgtcgtgaacgggacgttcgaatattcctacggcagcatggctaaccgccgcgggatcgcgatggtcacttttgacgacccgaaggcgcactataagacgcagaccactgtggcgcagatcaaagacctcgtggagcgctatggcgttgagccgctggaagtgtccggcatcggctgcacggacgaatacgaagcgcaacgtcgcggcctgtgggcgctgctgtcgaataccaacgacatgcagatcagctaccgcgtcggcctgagcggcatcaagtacctgatcggcgacgtcgtcggcatcgctaaccgctacgtgcagggcggccagttcggcgggcgtgttgctggcgtatccggcactaccatcacatcagaccgcacgatctccgatcacgtggcaatcggcgatcgcgtgattgtccggcaggctggctccgacggcacctacaaccgcgtgatcaacgcaatcgcggctgaccggatgtccttcaccgtcgacggcactaaccttgatattcagagcggtgaagtgttcctgctggatactaaggtgctggcaccggaactaatccgcatcaccaagatcacctacaacgagcaggacaataatttcaccgttaccggtctgcaatacagccactcgaagtatttgcaggttgacaccggcgcgcgaattgaagaccgcccgacatcgctgatcccgatcggacaggtacaggcacctgctaacgtggtggccgaaggctacagcatcgttaaccagggtattcgctcagctaacgtaaactgttcatggttcaccgtagatcaggccgtcagctacgacattcaggtgcgccgaacctctcagtcaaacggtcagtggtcacagggttggactaaccttgccagccagtcgagcacgtccgtagacctgaccaacgttctgaccggcacctatcagttccgcgttcgttccgtatcccgtgacggcgggtcgtctcagtgggtcgagtcgaatcaggtgttcgttgacggcaagcgcggcagcatcccggcagtagctggcctgaacggcgtaggcatcgttaacggcatcacatggcgttgggtgactggcacagatgatctgatcgatatgaagtcgacagagctacagttccagcgcattgacggaaatggcgctccggttggtgggtggatcgatctcagcgtcgtgacctacccgaccgggacgttcacacagtccggcctgaaatttgccgaacgcgtgcaggtgcgcgcccgctttgtgtcgtcatatagcgatgctggcgagtggagcgccccggtcatggcgatgacgtccgacaacatggacgactattaccagaacatcgacgacgcgatcaaaggctccgacacctacggcgaacttaccagcggcatcaaagacgtaagcgacagcgcacaggcagcgaaagacgccgcgcaggccgcgcaggttactgctgacggagcagtgacaaccaaccagcagcagcagcagcagctgaacaaccagctggccgagatccagaagaacgcgcaggccatcaccaccaccgctaacgcgggggcggcaaacgccagtgcaatcgctcaggagatccttgaccgcaaggctggcgacatcgcgaacgccaacaaggcagctcaggacgtggccgacgctatcgctaaggctgagacggatgacgcagaagtggcagcccaggctgcggctaacctgctggcgacaaaaaacgaagtcgaagcgcagatcagcaccaccaataccacgatgcaggacggcttcgacagtctggctcagcagatggcatccatttctgctggcactggcgagcagttcgacagcctcgctatctggtatttcgacaacggcccggaagggtgggcttctgacgacgccaacaccaatctgctcccagtagaccaagatggctggatttacccagctggcgcagcagccaccatgcgctcaccaaacccgctggcaatcgacgcgcgcagctataagtacatgcgcctgcgcatgaagcgagtcgggaacccgtcatgggctggcaagctgtattggatcggtgttgatgagactggctggacaagtacccgctcgcttgctatcccggcacctgactttgacccgaccaccgggatcactgtcctgtcgctccctgatctcctgtgggcgacatccggcaccgtgcgccgcctgcgctttgacttctcaaacaatcaggacgccagtaactactacgccgttaactggatggcagtcggcgtccgtccgacacccggcgcatcgcaggcgcagattcaggatctccgcacggccatgaccgctgcggattccgcagaggctgcggaacgtaacacgctggccgttcagcttcgcggcaactatgagggaaccgacccggccaagctggtgacgggcattatctacaacgaacgccagacccgcgtcaccgcagaacaggccatctcaagcgacgttaacacgctgcgcaccgactacaacgccaacaaggccgcagtcacccagcgccttgacacgctgaccagcgagaatcaggcgcaggctcaggcactcacccaactgcaaagcggtctgaccgatgcgaacggcaggatcacggcgaacgccaccgccatcacccagctcaagactgatgtgacaaacattgacgggcgcgtgacggcgaacagcacgctgatcaccgggcttgagagcacgctgaacggcgacgctatcgcactggccgctaacccgaataacctcctgacgaacaccggcttcgagcgcaaaacggcagcgtggactggctttaacgcctattccgacgtgtacgccgcacaggtgcctaaatccggctctatgatccttcgcgggaaggctggcggcattgcctccatcggccagaacgtcgccaacgttcagaaagggcgaacctatcgctacggtggctgggtcaagcgctccggcgacatggcgatgagtccgaataccaccgggaataacaagttccggttaggcaacgctgatactggtaccggcccgctgtccgaactcctgtacaacgccaccaacgtcggcactaactggacgctgttcaccaaggacttcaccgcttacagcgacatgacgattttgtatagcgtcaactggatcctcaccgctggtgaaatctacttcgacgacgtctttttcatcgacgtgacagaagaaatcaggaataacgccaacgccaacgcgatcaccgggctgactacccgcgtcaccgctgcagagggtgccatcaccaccaacagccaggcgatcacccagcttaaaggcgacgtgagcaccttgcagggtcagatggcgaccaaggccgaagcgagcgcattgcagcagctggcaaccactgttacccagcaggggaatacgctggcgtcgcaggggcaggctatcaccgatttgcagaacaccgcgcagaacgggaaagcgaagtactggctgaccaaggtcttcgacatcaaggtgagcggtagcgggtacatcccgaaactgtccgacctgtctggcgttccgccgctggccgtgtctgagatggccgacgctgcaaaactggacttcctgacttacggcgactacaaaatcgcgtatgcgaagtcgctggtgtatgtcgcagctgacaagactatcgcaattgctcctggctcacgcatcgtggacgacaccgcgcgcctgtacatcaacggggcagaggtagccaccttcggtgctgggactatcacctatagtctggtgctcaagaagggctggaacacgctggaatttgtggttgcacagatcaccggccagttctttatcaacttcgggctcaaactctccgacaacgttgatcagctattcagtggtgccggtcagctggcggctgcatccgcatcgcagatcttctcctctcaggttgagcagacctccgggaaggttgacgcgaacagcgccgcgattgtcacgctgaacaactcagtgcaggacatcaacaccgcgctgaacaacaaggccgatgcgagcgcgttgcagtcactgaccacccgtgtcacctctgccgaagggaagatcacagctcagggcgatgcaatcaccaggctcaacagcgacgtgagcaccatcaacggcacgctgagccagaaggcggatgccagcgcagtcaccgcattgcaaactcgcgtaaccaccgcagaaggcaagattgagagccagggtacggctatcacccagctgagcaatggactggaagcctaccgccgcaccggtgagaacctgatccagaacttcgacttcctgcaagcgggcaccgcgtacagcgtgcagcaggacagcgtcagtactgtgaccttcggcgcgtacggcgacggcaaagcaggcgtgcgcatggtgcgagccaacggcacatctccgggcctgttcgcgaacaacaaaaatccggtaccgcagaacggacagcgccgttaccgctacgttgtgcgtgcgaagggtgtgagcggggcaatgaacctcctcatacgtcgctggaacttcaacggcaccgtggaaggctcttacgctgacaagaacaacacgctgacgactgactggcagaccctgacatgggagacagatcttaccccggccaccggcgttgatgggtcggcttttggtctctactgcgatccgtcaaacgcggagatctggatcgactccttcaaggtttacgacattaccgaagaagtgacgatcaaggcgaacagcgacgcgttaagcacgcttaccagcaccgtgacgcagaacgggaaagatattgcggctcaggcgaacgcgcttactcagctgaaatccagcctgacgaatgacgcggtggcactggcaaccaatcccaacaacatggtcgcaaactctggttttgagcgtggaaccgataactggagtggttttaacgcttacgcggatatctacgcggatcaatcgccacgaactggcgcatatattatgcgcgggctttctggcggtaacgtggccgtgtctcaggtcatcctcgggatcaagaaaggccgcacctaccgttacggcggctacatgcgccgcgattcaaacacgaccatcggataccaaggaaataacaagttcaggatcggcaatgccgtcaccggcgatggcccgattcatcaggtcgaatactcgcaaagtaacgtagggacaagctggactcttattactggcgattgggtgccagcaagcgatcaaaacatcgctttcagcattaacgtgcttttgactgccggtaacttctactttgacgacattttctttgttgacgtcaccgacgagatcaacaacgcagcgaacgcgacggccatcaccaacttaacgacccgcgtcacgtcggcggaaggaaagatcacgtcgcagggtacggcgatcacccagcttacgtccgacctcagcaccgcgaacgggaagatcacggcgaatgccaacgccatcaccagcttgcagtcgaccgttacccagcagggcaacaccctgaccactcaggggcaggccatcaccaagctgaacagcgacctttccgacctgtccggcgtggtcgacacgaaggccagcgcgtcggctgtatctcagctgactacccgcgttaccaacgcggaagggaagatcaccgccaactccacggcgctgaatagcatcatttcccgcgttgacgatgccgagtcggcgattgacggcctgaacgagacgacggcagcgaacgggctggcgatggcgaacggcttccagcagctgcgcgcgcaaatcggcgacaaccaggcggccatcacgcagacgaacaaggcagtagtggatcttgagtctgcaacggcgcagcagatcgacacgatcaacgcgtcaatggatggcatgagcgctaccgtacagcagacctcaacggcggttgcggatatcaacggcaagctgtcggcgcagtggggcgtcaaagttcagactgacaccggcggcggcaacccgcgcattgctggtattcagcttggtatcgacgcaagcggatcatctcaattccttgtcatggccgacaccttcgccgtgtacactggcggggcaaacaaaacttacccgttcgtggttcagaacggcgtggcgtacatgcaggaagcgctgatccgcgacgggtcgatcaccaacgcgaagatcggcaacgagatcaagtcgaacaacttcgttgatggctcgcagggctggcgcatcggtaaagatggtagatcgcagttcaacaacgttatcgttcgcggtcgtgtcgaggctaatagcggctcattccatggcaccatcgacgcgaccgacgggatctttcgtggctcagtcgaggctaacagcttcgttggtgatattgcggcaatgagcaccttcccttccaaggttgggtcggcctggaaatctcgcatcatgcaccatgactcaagtgcgaagggcggcaaaagctatgctatctgtggcctcatccgctgggatgcgggcgacaagaacggctcggttgtcgtggaatgttatgtgaatggcgttcgggtatcgtctcagtcgtataacggccgagacaccggggaatcaacccgcgtgcgcttgactgccgtcggcgttgcaactggcatcggcacgagagacaccttggttgagattgtcgtgagtggaaccggcaccagtacgctggaggctggttactgcgtcatgtctcgcggctcaggctcatgggaagcagtagcataactggaggcggcccctgtgggggccgatattgaatggcaaatattagcgatcagctcgcggctgatattcacaacgcgtttaacaaatactacacagacctggcgaaccaggatcagatcttctttggcgtcggtgatgtgacaatcacgaagcaggacggcaccaccgccactgtgcgctcatggaacaaggtcattggctcagtggacaccgcagcgcagcgcgggacggagaataactttaccgctgtacagacgttcagtgccgggatgaaggttaacggcaacgtcaattgcatggccgacaacgcgatgatctacctgggcaagaactcagatcttgcgctgcttaaaaagagcgggcagggtggcaccatcgccgtcggcagcggcacgccgtttaagatccagcgcacgaacaccgccaccgtctcaccggcttctacggtcgaggacattcttgttattggcacaaacaagcaggtcacgctggctgggcctttagccgccggtggcaatattgacaatacgtcgaaggggaaaatgcttacgcaggcgattgagctgtcatttagcacgccatacatcgactttcattttaactacagcaccgacgacttcaccgggcggattatggccactgccgccgatcaaattagtgtacaaggtagtcattggcgagttgacagggatcttcgtgttggtggtgcggcagatattggaggctggacgcaatgccgcgacgacctttcggccaacaaaacagactttggatcccctgctattggttcgttggtttcaggcggaaggattcgatctcgaatgctcgggcgcggcggtaacgttgacacctccggggcgtggggcggtttctatcttgaagagtacgtgggaaccgaacacaggattgtcatgtatatggacggcttcgggagaacggacgcatgggcattccggtcaggtggcacgatctccacaccaaaaggcgacgttctcactaccggttcagacgtgcgcctgaaaacagacttcacccaagcgcctgagaacgcctcagagcgaattgaacgcttgggggtatgtgagtaccggttgaagggagaaacgcgcgttaggcgtggttttatcgcgcagcaggcggagactgtagacaaggtctacacctatcaggacgtcgagcaggagatcgacggcgagcgtatcaaggtgatgaacgtcgactatgtggcgatcatcgctgacctggtggcttcggtgcaggagcttcggcaggaattgaaggagctgaaaggggaataaaaaaaggggccgatggcccctttctttacagcacgtgataaagcacgttgatcacgaagcccaacacgaggccgatcgctgctgccagtaatggctgtttcattttgtcaaacacgttattcaccctctactttaacgagttcatgccattcgattcccaggggcttcgcaaggcggatcatggtttcaatggtcgggaactcacggccattgtcataacggcatacgcggcactgcgcaatgcctgctgctttcgccagaccacgctgggaaaatccagcgcgctcacggtgttctttcaaaatcagtgtgatgttcattttctacctcagaacgggatatcgtcatcaaagtccatcggcggctcgctggactgctgctgtggttttgactgctggcgcgttgggccggaatgtgtcttcggctgtccctgcggctgcccctgctgtccgccttcgctcttgccgcctaacatttgcataacggcgttaggcccgttcagaaccacttctgtcgtccatttctcgactccgttgctgtcagtccattttcgtgtttgcagctttccttcgacgtagatctgagaaccctttttcacgtactcgccgacgatctcagccagcttcccgaagacgacgacacggtgccattccgtttgctcctttacttctccggtctgcttatcgcgccatgattctgacgtcgcgatcgtgaggttagccaccgcgccgcctgacggcatgtagcgaatttctggatcctgaccgatgcgacccacgaggatcaccttgttaactccacggcttgccatttataacgctccttaaaaatcttcttcgacgtctgattgctgcggcggtacatcttgcggctgaacgtcatcaggtgcaacctggacggtagccttaccgcgtttagcattggctggcttgccggggttgaacggtctggcctcagcgtttttcagctcgacgatcttgctggcgcgggcatcttcgacgatgcgcagtgatgccttgtcgctgcggaacagctcgcacgcggcgcggtagattgcatccacctcatccttgtccttcgcggcttcaatggagcggcggcagtcggctgcgctacgcactgatttgttgccatcgtcgtcatccatggtgaggccgaagatcgaaacgcgggcatagcggcgggcgtaggtcagcgttgagccgaagccctgggcgtcgttcttcgccagcgggatctggcagatatcggacagccattcgcctgtggcaacgtggatgatgcgcgtctccatcagcatcacgttcggagcctgtccggcctcgtgcgtcggagactggatcatgatcaacccggcatcttccattgccgggccgatggcggccgcaacgtctccgagggtcgcatagtggtttttcaggtgctggttctgcttggatttcttcggcgatacgcacatatcctgcgcgtgggcaaactgcttaacgatggtgctgcatggctgagaaaatttcatcatttggtcactccttatattgagggggtaatatgtcagtatattaccccggaatcaattattttttggttttcacatcttcccacaagtggcggaaggcgttttccaggtagtacggaggatcgaggtcaatcacgcttccgccgccgtaggtcggccacgtgtcattgtcacggcaccatttaaatgtggcgatggcttcacgcagctgcgcatatccaatcatcagtgttttgtttgacaaggcgaaaggagcgacgacgaacgggctgctcttctcctgcgccagcaacatcgtccttctcggtttctggccgaaagccgccttaaacccctcgcgctgcaacgccattttcagcggatacccgagatcgaagcacttacgcatgaatctttcagggttggccgtgtccgtggtcttatagtccaccatgtcggcgaacttgctgatccagtcgaggcgtaccttgcagcgcaatccctgatagctgaaaaagatcgagacttccgacattccgtcaacgaaatactctttaaacgagtcgttattaaacagaacggcgcgcatctcctgaatgatgtcataatcctgtccgcgaattccttcacgatcaccgcgctcttcattggcctttttcacgatgtcgtgccagaaaacaacgtcagttatcccaagagctgcggcggtgttggtgactgtctcaattaattccggctctttcattttcgaataaccggcaacaccgtgttctttcagaaatgccttcgcggcctcaagcgaggtaataaagttcggctgcggaataatatcgcctttatcgtcacgcttaataaagtcctctttctcaggcatgcggaaatattcacgggcaaataattcaggttcgaggtgattggcgtgggcagcagttccgaataccagtgcgcgggattgctttttcttttcctctgcgaacttccagttagccgggcatgtggagaacaactcccacaagccggagccgttcatgtggtctgtctcagcgtgatagtcttcgttcgacagatcgttattcgtgaagaacagaacttcatcatctttgagcgatttaatatctgacattacatgatccccttattcatatctaaccgaagttttcgctcgatatcttcctgcctgacaaagcggcgtgaatcgcccttgcaattaactttcaatagccatttgcttttattctcaatagccggatacttcacggcaggatcgcggaatagaatctgaccaagcatcaactcggttccagtgggtacgccacaaaataaaacctcccatagcacgtccctgataagattatttcccggcgctctatatgtgagaaccactttctttaatgatcgcataaggccgtaagcctctttgaatgttttgcggtcagtgttgcgaatgccgccgtgcaatattctgtgtaactctgcatgtgtcatgatgacctcctgtgtggtgtttgggcatattacttccgcataataggccatgtcaaggctatttaactatgatggtcgacggcccgaggaagtcgatcaccgccatcttcgcgcagtggaagccatacgccaccgcggcgaacccgccctgagcagatacggcggacagacattcaacctgctccttgctgactggcgtcgacagcttcttgttctcccgcttcatctcgatcaccccgaacggctccccgttgcggccacgatgcaggatcacgatgtcggcaacgcccttacggagtcccttcgcctgctggcgcagaaaatactgcttgccagccgtcccgccgttctcgttcggcacgtggaaccagtacacgtctggataccaatgattaaaccaggtggtgaagttaatcaggtggtcatcctcaagcgccttcgtcagcttggttggtggatccagatattctttgatcacaggtcgtcacctccttcgaaaattttacgggctatgacgtcgcgagactttctgccgcctatacgccggtgcgtcacacgcttaggcgctgcaatcaggtgagcggacggcaggatcttcgtttttacccctttccgcatcttgccccgggtgttcggtgatgcaacgtgcttatccagtgccgccttccactgctgttttgctggcatgctgtcactgtccggccaaaacacctcataggctacgaagtcaggatccccctcattccccagcacgtagcggaacaccacgccgtttccgcatttcgtcggttcaacgttgaaggatcgcacgtccacaaagtcatcccgggtatagctctttttctcaaggctcctgtttgggtcgatcaacgtgttcccgcagtgggcgcactgtcgggcggtgatgtcgttctctgcgccgcatccgcgactgacaaccacgccgcgatcgttcttaaagtcatcgcatgtgcgcgatatgaaccagtggtgacagcggtcgtccttgcggtatggcgtgccgtcttcctcgatcccgtcgtggtcgtacacatggcggcaccggcgcgcgtgcttgccgttcgtgtgtccataggggcattccttcgtctggccggtgctggtgtccgtctcatagcggtactgttcaaggaatggcgagaagtacagttccgccaggtcgtccagtgctccaccgtagtcgagaacaaggttgtcctctttgatcatcccaagctcttcgatgtggaatttcttgaggatgcgcatcccgcgaccgatgagctgaaccagcagagtgaggctgccgatcttgcgcaggataacgatcgtgtcccatggcgggacgttgtatccggtggtaaggcaaccgatctgaaagataaatttgcagcggttgttgaatgcgtcttccagtatccggtcgcgctccttctgtggcgtgtcgtcggtgatgatcccgtaagtcacgcccggaggtaacgcgctggccgcctccttacagtgcttcttaccggcgcaggtaacgagtacgcagttacggttggcggtacgcttcacgacgtcgagcatgatgttttgcgtgatggttccctgggacaggatctgcttctccatctcgatcaggtcggcatcactgaattcgtcgtcaccctcttcgccgcgactcacgaaagaatcaagctggtaggtaagctcatcatcgatcgcaccgtaatgggtaggcaccaccgcgccaacttcaaccaggtactcagtggaaatgtcacacaccgcacgccgccagaatcctggggtgttcctgtcttcgttgatgatcggctgagtgcctcggtagtctgtgccggtgtacccgataacaaccagatcccgaccgtacatctcccggcaacggcgctgcatctcccggatgataagcgtgtacccggtgcggccagcggcgatcatctgcgccagcgtgcgttctgcgttgcgctgcaacctctcgttgtcggggtgcttatcagccagctcgcaagtcatctcgctttcaacgatgtcgtcgacgttgacgtgctggcattcgtcgatcagcaggaagcgcggcacgaagttagccagctgcttttcaagggcgttgaccaccgtcttctcgctgccgcaaatgatagggaaggtcgtggatttcatgcgcaggccagcgctgaacacgctgttctccaccccgaagttccgtatctccatggcgttctgcttgatgatcccgccctgacgtgacaacacgagcgcgggcttgttgagctgggtcaggcggcgggccaccaggctgatcagcgtggtcttccctgccgacacggcggccttgacgacgaacgggccgatctccttgtagttgttgatggcctgagacgtcgcaaagtgtgccgcgaactggaacgggtaggggtcgtatggcatgccgcgaagtcctcgcagtagctggccgcgaaccgcctctatgtccgtctcctcaatcatttgcttgatgcttttcaccttttccattgttgcctcgttgacgtggtaaacattacaatatattctgcacaacgaataccaaaacacaaggaatttaaaatgatgaatattggcaaactaccggaaccagaaattaccgagggcgcgatacagcgggcttttgtgcgttctatgggcaactcattccagatcatgatcccgaactactacacccctgacaacctcggatatgaggcggacctgttctgcatccgcaagagccgctacacggtggaagtggaggtgaagatctccattgccgacatgcgcgctgacttccgcaaggcccacaccgtttacccaaagacagcggaggaagcagaaaaatactggcgatcagacgaaaacgagcgcgtcccgtacccggtgaagatgaagcatgactgcctgaaagctggtgagctgatagccaaccgcttctacttcctggtgccgtggactatcgcggacaaggcacgggagatcctgccggactatgccgggctttacgtgtacaaccagcgcggactggtacacgaggaaaagatggggccgatgctgcacaagcgtaagctcgatccgaaatatgaccaggggatcatggccaacctcaacacccgctacctgaagctgtggaggaggtcatgaagttctaccccattgagcagatagaacgactcatggtcgggcgctgggaggttctgctatcccagtattgggataagcgcgcattcaacggcaggcatcaggcctgcccgctgtgcggagggaacgaccggttccgctggggcgaatcgaagcaggacgtcacgatgaagggtcgcggtgctgcaatttgcaatcagtgcggatcacacctgggcctgtggtggttcatgcaaactaccggctacgaattcccggtggcgctgcatgagataggggccaacttcctcaaggtcgagcctgaccaggaaatgacgaccgatccggtgatcgcccgcgacgcattcccgaaggctccgcgcgtcaggctggaagagaaaaacttatcagcctctcagaagtacatccgcaagcagcaggccgcgcctgactatgatcgccggttttggatggcctacgacctgatcgagacgatgcgcaaatatcacatgtgaaacacagttgacaggtatatggtgcccaagtaatatgcccgaacacccaacagaaggagcagaaaaatgtcagaacaaaccaccgtgtcaccgaagaccgccagcgcagtagcagaagaaatcaaaaaagctattggccgccgccgtatcccggtaattgtcgcagaccaaccggccatcgcgttcatgatcgccaaagaggccagcaaaacaggctacggcgaagatgagcagctgggagtgaacgccggattcgccgagaaggacgtggtgaaccagatcgctaacgccgcgctgttcagaaagtcatataaccgcgtccagcacgtcgtcgtcatcaagtcgagcaaggcggcagcggctggaaactttgatggccgctacttcgtgaagatcatgtgcaatcgcctgtatgtcaccatggggagcctggctaactatcttgcgggggcggaatagtgagcggggcaaagcccgtggtgattggctgccggaaaatgatcaaaggcagcgagcgcggaaagatggtctgctgtgggacatacttccacgctggcgggcgaagcagatgctggcacgtgatcgataatgtcgtggtgtgtaaacgttgtttcaaagagtggaaaaaggagcacaaagatgaagaaagcgatatttctgtttaaccgctcgcggcacatgttgcagccgtggttagacgctggctatgagtgctggacatttgacgggcagcttcctgacggtgttcacgaggttgagccgggattgatggcggttggcatgtggttcgacgcctcagctaccagcgtgcatgccagcgacgtagccaggatcgtaggtggtggcgtgaagttcatcgcctctttcgcggaatgcacatatctgaccactaccggcgcgcgctggctgtatcacccggaagatcgcgatcttccagttgctgagcgccgaccacacccggcataccccaaccgccgccgggatatggaggacgctgtgaagctggcgaaattcgttgagctggtggaggcatatcgccacatcgtcaacggtgatttttccaccggccagatcccgtggatgctggagaatccggctcgatcattcctgccgaagctgtggcgcaacttcaatcacaccttcaacccgtgtgactatggcggctatatcccggagggtgaagagatgcacccggactaccctggtgtcattcctgaccgtgacgcctacaccaagctgaccgggatctggtgcagtgaagcgttcgtgatgcccgagccgaagccggtggagccagtaggcaaggatttcaaccgggcgataaaggtcggcggaaagagcacccgcaccaagaacatccgcagcgccactccgcgaggcttcgcgctggctgtattcgaggcaaaccaccgtgcataagttcattatgacactggaagattaccggatgtttgccactcgtgaagaacaccgcgtgatcagcgttgaagagccgcagattggcgatgcctgcatatcgtgtgagggccgccttgatattcacgtacaggtgatctcctgtcgtgaatggacgttaggcggtcagctgttttatgtgagcaaaatcaaatatcggtcaaataccccaaaggaaacgaaatgaaagacgaagcagacaaagtgactatcgacgagttcgaagcagaccacaacccggcgctgcacgcggaagccgcagcaaagggaattacgccgtggcagctgttcagtaatcgcgtatgggctacgaaggggctggtgactggcgggcactaccaggcagttcgcccgcagaaagtgaccggccgccggttcaacgggagcaagaccccggataacgtccgcccgaactggcgcacccctgagcacgtgttcgcgtggctggatatgacctacggcccgtttgaggtagatcttgcggcctgcgagaagtcgacgaaatgcgacttctacttttgcaaggaagagaacagccttgcgcaagactggagccagtttgatgcgatgtttctgaacccgccttatgacgacatcacgccgtggacggagaagagccgcgagatcaagccgggcgcagtgctggcggtggtgctgccgaacgacaacagcacagtgtggttccgcaacatggtggatcaggcctacaccatcatcaacatcgtcagcaacggcaagaactctggccgcctgtcgttcgaacacgctggcaccgggaagccaggcaagcagaacaacaaaggcaccgtgctgttcattctgcgcgggcgtaagcgtcgcgccggtgtggagacgctctacatcgatcaggatcaaatgctgcgcgaactggggttactggatgcacagtaaggcgcaggtctggcaggccgctaaggagtgcggcctcgacgaattcattaccgccgtttcaaaagcgtttcccggcgcgattgacggcgtggcgatatctgcgaaagggatcggtgttctggcgactgacgaccgcatgctgcgcaggctggtgagggttaaaccgggcgtgacgctcacaaagcaacaggtcaaggagataaggacgaaatctggtgttactatgcgatataaaggggaaaattgaggagtagcaccgatgggtaagacgtacccgaggcacaatgcccgcactgtatcacgggctgacaggctgcgcaggatgaaccaagataagaacacgcgagtcatcaccaaatacatcgccgggacactagcccggataccagaaggagaagatcatgacgttagcacaggcaatcttgaaggcatcaaccgaagggcgagatcttaaagtaggaaagggcgtagatcgtgagaacaagcacataggcccgcgaaacggtaagttctggactgacgaacgcattcaggaagtgaccgacgacgtcaccgttcggcggatgacgaaggcgcagatcatggagaagcacaacatcactgaaagcggtttttacaacgcctgctaccgttttgggatcccgacaacaaaatgaaaaaacataccgttattcatatcgacacggctgaatttcataatgccgtctacatccttggtcgtgaagagaagatctataactggaaccagaacgtcgagttccgcaaacgccttgttggcctactgggggagattgcagcagcgaagcacctgaacaacatttacggccgccaccggatcatcatcccgatgggagtcaacgcgcgcaccggcgtttcggttaatgcgttcggccagggtgacatcatgaccatctcacgcacagggacgcgcgaacggcaaacgcacgtctatgaggtgaaatccaccgagggaatcggcaagcagttgccaaccatccggcaggacaacgctgaaagctacgtgatgaacggcgttgatgcaatcattctggtggcggtgcatatcaacaaggcgaaggcagagtgccggatcatgcagcaggtatcgcctgttgaagtgatcgagaagtggaggccgatggttaaccggtacggtcaggagtgttatgctttcaactaaatagactttgagattatcatggcccccgttaacactcacgggggcttttcttttgggcgacttcttccacggcatcaccgacatctatcggatgtataagaccgacttagattaccccatcgctgcggccgtcatggctacattgcgtcacatccagctcggtcatgaaaggcgacagatctggactaatgcgatcatggcggcaatgttcgcgaagggcatcacctttatcatcaacatcatcggggattccgttccgcgaatgcactggatcgcaaaccaggatgcaggctggatcgttgcctgcgtgcttgggtacgttgggatcgacaaggtcattcgcgtggttgagcggtatttcccgtccatgaatctcaggggaaaaaatgatcggcaaccttaaaatttacctgctggcggcacttgccgcctttttgctatggcagggcggcagctatgcactgagcaggtacggcgaaagccggtatgaaagcggcgttacagctgggattaacaaggaggctgaacgcagaaacaaaattgaccgtgatctggccgaaatgcgccagagggagaaagaccaagatgatcgcgacacgactagccggattgaccaagcacgcgctgacgctgctagtgctgcttatgctgctgacaggctgcgccagcaactcaactcagccactgccatcgcaaaacaacgcgcctccgctgtcggcgttagcagtgatgccggaacgctcgccgatctgctcgccgagctgttctatcagtcagtgcaagcgggtaacgaactggcagcagaagctgatcgatactacatcgccgggcagcgctgcaacacccagtacaaccgactattgcaagcagcaaggagtaacaaatgaagatgagtgacaacgggctgcaatttacagcagcatgggaggaattccgcagcgcgccttacttcgccaccgaagacgagcgccgtcgcgggatctacacctggggcttcgggcacactggccgcaaccctccacgcatcaacatcacgcgagaagccgcgctggcgatcctgcgtgaagacgtagcctatgctgagaagaaggtgaacgagtgggcacataagtccatcacgcaacccatcttcgacgcgctggttgatctggtcatcaatgccggtgaagagccaatcaagccggacaagaaggcgggagacttcgacgacctggtgacgcaaggtcgctgggatgagctgatcgtacagctggagttcttccgcaaacagaacgggaagatcatccctgggctggttcgccgggcactggcgcggcaggcgctggcgaaggggatgaactggcgggatgctgaggccgttggccggaacgcgaaggtgtaaaaaacagggggccatttggccccttgtttttagttcagaacaatgaaactcaacagcagatagccaggcgcgtattcgccaacgttggcgatgtgagtcacctcaaccctgaacacccttcctgtgtatccgccgatctccgtccactccctcaacatcagggtgtcgccctcagcgtaatcccggtcgaacttccttaactccgctcgttttttaccagaaacagccgcgttaaagtgaaccgggaggattttaagatcgtggatcacttcatccctcccacgacctcagcgccgatagccgcgtacccagcgaggtcttcgaacgagtcggtgttgtcgtcagtctgagcgcggcagatctttaaaatggattgtagcgtcaccacgtccaggccagtcagcggcatgttctggcggttcgcagacgaacgcacgatattgaatgcgtcagctacgcggtcgaactggcgctctttgccgttctccgcgccgtagcggcgaccgcgctcctcaaggtggccctttaccttctcaagaacctgggcggcgtcaagaggctcagaggagcttttatgggcatcggccttttcggcgaccatgtagatcgcggttccatccgtgcgagcacagtcgcggttcagtgtcgcgatgttgtcgagggtcagcgccgactcataagctacaccgtggtggtggaagaagttggtcggaaattcgatcacgttagggactgagtattcaccgtgttccaccaggcaatgccagcgggcgatgatggtttcctgtccggcaagctcaccgtagccgatgaacgtcaccagcgagttgcggcccggaatgttgctgccgcgcagcgggctgccgccttcgctgatctcataggtgaagcgcagaatgtccccggcagtgaagcggtcggtaacgtcagttgtttttttcttcttggtggtcatgttcatttcctcagcattgcattagtgttttgcgccagtctgcgctttcgagatcgacgtagcctagcagaacaggcaccccttctgaactccaaaattcagaacggtaattcacgaacggctctatgtcgtaggcatatagcgcgccatccatatccaccgccacccaattcgaccagcgcggcacggttatgaccatgccgttatagttgaataccttaaacagcccgttagttatcagcttcataatcatccccaaagcacggaacgcgcgggtaggtcactggtgcataggcctcgatcctgaaatcgcggttacggtctagcggctggtagaatgaactgaactccgggtgaatgccttcctggcaccagccgacgaagaagaacggttcgccgccttcatcggtgcggccgtcccagcacgccagctgttcatcggtgtacccgcattcgtcgaaattaacgtaccagaagcggcggatcaggcggcagttgttacgcagacgcaccaccacccaaaactccatttcatgcccgtgctcaatgtccggggtgtcgcccaaagaccagactgacggcaagaattgttcgaatactggctctttctgtttcatttgcaaaaatcctctacgttgatgaagtcgggggtcataaccatgttgcccgcccgtaggaagctcaggccgaagcggtggatcagggtgctgcactggtcgatgtcgctgtagtgcatgcgacgccagaatcctttcagtgtcccgacgtcgtcccagcgcacttgcgggcggtcgatgaactcagcgcggacgaaccggccatagtgccaaacccattgccctggcttcacgtcggagacctccacgagcttagtggggaataccgggatcttactcatcgtgctttcacctcgccgtagtagccaacgtccatcaggtctgatacgacagcgatgacctgagccttcgcctcatcatctgccttgttgttggcaatggccttcatcactgcgctgcgggtgacgtcgaacatcggttctgacacgttacccttgcggtagcgctcacccagcttgcaggcgtccttcatgaccttatccatctgcgcgttatccggcaggcggtcgtatacaccaagatcgcgctggatattgatgttcttgatgccaacggcgcagctaacggcgctggcgtccccgacgtatgagcatcccagcacagcggcggcggcgatggcgatggcggtaatgcgtttcatcggttactccttattaccacggatggcggcgatggtttcaatgtggcggcgctcttcctggcggcggcgctcttcttcttcggcgatgttacgcatcaccagcagaaacaggatcgccagcagcggggagaacaccagcgacagcagcgcccaacccagtccattacgtccacgacggtcagcagcgatgcctaccagtaaagccagaacacaccaaataattaacacgctcatgattctctctcctgttagtcccggcaccctgccgggatctgcatattagtacggaataataacccgtgtcaacactatagaataattccagcgccgtgcgtgtaaacggtggcgatggtgagcagctcaaggcgtagcgacttcaacgccccggcggcggtctttgcgtcgatctcggtgacgtggctcttcgagtcggtgtaagacgctttgaagcggttgtgcccgtaggcgatgcagcgcacgcgcccgaactcgacgacgacgcggtaggtcgtctccttcgtgttctcgttgacggcttccagcacggcgaactgtgccccagtcatgagcattgcgcagatatgcgcgcccagctcgcgggcttcttcacggctggtgatcttctttagctggtcaatcatttcgggcctcctcgcggcctgctggcgtgatctcgcacgccccggtagttatgttccattttgccagtccacggctggcaagtccgttaagcgcggtgacggtgtgggccttgctgtcgtagacccatgcaccagcgcgccattctgagacagcaagccgctttaatacggcccgctgcctgatacgcagcttcactccgggcgaccaccggcagccagccatgcagcgtaagcgatggagcgggtcagatcgcacttcatggtgatcttgcggtcttcatcggcgttgacccactgcgagaacgtcagattcagaggcataggctcaccctcagcggctgcgagcgcgtggtgatagctgttcagcgacagcagcagggagacgcgctgccgggcagtcatttcacgcatgatcgcccgcacgcacatggaggcgctccccgccccttcatgcttgcgctgtcggccatcccaaaactggaatttcatcgacagcggtggtcttttacgtccgtccataatttcctcctgttatgatatatattcgacggtttcaggaatgatcgccgcatatttgcagcgttttagcgctggtatatggtcaacaatatttatcagaaaggcagctcgctatcgatccccgtcacccgtgggcgggccatcatctcaaggtattccttttgggcctgctcctgcgccagttttgcgagacggcgaacgctaaccatcagtttaacgatgaagcgggccgggtaacgatcgagggcaagcagatcctggcgaacgcggtcaacggcacgctgtacgccgatgtgcatcaggtagccgttgtgagagtagtggcgggcacactgaacagcgcggtcaatgatgccattaacttccagcgcttcggcgtgtgcttcctggcgggctgcgtaggcgcgctggccttcaacggcgtccagcagtttagccagaagcgctttcacgtcgcacagactggcgttagctttccactctgcctggttccagtcgtcgaggttagcggagatgtaaccttctacagcctgctgcatatcgtcgtacatcgtatcgtcaagggtgtcgacgttttcgcagatcagcgcgttcgctgcggagtcgatgatcaggcaggccagcaggtcggcgttcttgaactggccgcgggcttgctcgttggtcatccagcttgccgggttgccgatggtcagatccagcgcggcgagaatttcgttagcggcggtaagatatttgatagctgacttagacattttgcgaccccttgtgatttatcggttagttactgcctgttcgataaatatattataggggccgcatcatgtcaatagtgcttacactactccttaatgaattctttgaaatctgcggacgatgtctcgcgccaggtcatcagcctgccgttaatgatcgcgtgacgctcgcagttgtaatcgtccctgaatttcagaatggtcatggtgttcaggccggtcttggtggtcagcttgcgcatgctgcccgctttagcgagaagtgcggggatgcttgtaacgtggcaaatcaggctcatgttgttttcctcagtggttatcacggcagctacccataagcgggggaacggcatctttgatcgtgtagtaagggttacgggcttcgtgtgggttagactctttgctcaggtgtcccagctcagccattttgtaaattgcgtcgcgcactgactcccgtgaatacggcgtcccgtcagccttaaacaccgtggagctgatacggtgcaggatctccttgtatggcgcggttccgtgcggctccgccctcagcagagaatacacggcttcctgcaatggcgtgtacacgtgcgcctggcgcttctcctccggctcaaagtgctcctcatccgctccggcgtccatatcgtaaacgcggtcttcgaacagccagaccttcgtcgcgtcgtcgatgtagatgaagtctggccgatcaacctcctgccctggggcaagtttcttctcatacgtgcttttcttcttcgcctcaacgtcattcgcgaacaccggcacctgaaagcctttgagcttaaagcgccccttcaaaccaccctggcggctcttgccgacgttcaggacagtgtagcctgtctccttctggcgggcgttcaatcccttgcctatctgtgtcttctcgcgtaccaggctgaacgttttatacaccgcgcccttcgctgcggatcctccacgagactcaagatcatactggccggacatcaggcttcccttgctgacatgcgggatgaagatcccggcgcagttgagggactcagcgaaccggtgcccggcagtggtgatcagctgctggtcggtgttgctgttttcgtccatgctcacgccgttattgttggccgccgccaggtggaacattttgctgtcgaagatgaccagattcaccggcctgccgttggcgaactgcaacacgcggctcttctggatgcgcaactttcctggctccatcaggtcggccggccgcttgaacaccttgatccagtcacggagattgacgccggtgcgcagcgaccaggcggccacctgcaactcaacgctgtccgggtcttcggtgaagaacacgctgacgccggggttacacacgcggaagcagttgaacagcgggcgacccatggcgaggctgaccgccatttgcaccagcagcgtcgttttccctgcgcctgcgtcaccgttgatctcgttgatggtgcggcggttcagcagaccttcgatcaccgggtcgtagaagtccggtgaggtgttcagcacatactcgccagggtcgtaatctttcagcgcgggatcttccaccaacccctgctcaacctcttcggcgaggcgctttgccacctcaacgcgctgggcggataagtccatcccgagattctgcttttcattctcctcgcgaacgatgcgttgcagctcaaggtggcgctgaccggcgtctttcttcttcggcttaggtggttcaggtggaacaggtggcgatacttcttccgcctgttcacgctcctccacctcagcacgtgctacctggtcgaagtaagcctgcatgtcggccatttcctgcgaataggcttcgtcctcttcctcgcgggtcattggctggttgagaatgtccgccgcttcgtgctgtttctcctgatcgcccagcaacgccttccagtcgtcgggcgtcatcggccttttgttctcttcgttcatcgtttcctcctgctttggttcggacattattcacggcaggtaataccgtgtcaacagcgattactttccgcctgaaatcagggcggtttttgcgtgtttatacagtatgtaaacaatgctgagggggactcccccgtatcaatattatatttccaagctaaatcaagaggatggcaaaaagttatcaacagaacacctgtacacaaattgagcacataaaacgcgtatacagtaccggcaacagctcaggcggaggtgttctgccgtgcttctaacggtgaaaatactaagttattgaatcgcaacgattaattcaggtggccggttaaaaatgctcaatacctgacgattgcaagtagctgatatgaaaggattaatttcaggtgttaagtggtatccctattatatataaaacccatataattacagaaacacgtacacccttacgcac

SEQ ID NO: 43 - DNA, 157662 bp, unidentified
  source 1..157662: mol_type = genomic DNA
ttaacgataaagcccttcaacgtcgatagatttgtgttgacggttgtactcagcggtgtaatcatccaacaccaggtattcacagcaacggattttgctggacttgaagtcatcagtgatagacacgatgtctttcgggttcagtttacaacgaacaacgcgctggcccagatggccgaagcattgcttcaaatatgccagcgagcagacatgcagcccataggagcacaggtctttgttgtcatcattgacgaaggaacgcgccatgcgtacaatcgtccccggcgtgttgtcgatagtaccagagtgcttgtccatgtaattgccacggaccgatttgtacagaatgatatcgccgtcttcggcaatctcgatatccgagtatgccataaactcataaatacggccagactgtaccagggacgaactcgggttctggaacatcttatccaggaagttcgtcaggcgctgcaggttattgtagtcgccacgcagcatcagcgtcaggatgcgtttggcgacgctcgtgccagtgatatcatgaccggaccaacgcacccgattttcgctaatatctaccaggccggaagcgaattttccaatcgcttcgcgcggcttcatcagagtatatgccagcttgatatcgcgagatttaatcgcttcaacgatgcggtcataggactgatggctggtcgtgatcgtttccggtttgccatcgattacgataacaacgctctccggcaggatcatgatctggtgttcattcaagaacacgctcagttccttatcaccgaattcagtcttggtctgtttatcggtcatttcttgcacttctttcagtttgactttgaaagtcaccgaagaaagagcgagacgcagggtgcgaccgaggatgctgtcgtaataaccgacccggcggcgggcgtccatagagccgcgcatcggatacgtgtcatcatcaggcaagacaactgtgatttcggacatttcacctttgtagccttcaaccaaggccgcagccacttcggccagcgcaacgattttatcgccatcttgtttagagtaaaactttttagaatcttctgaagccttcagctgatcgcgcggtatcatggctgctttgatcacgtcatagctgtcgtccgtataacgcaaacacagaaattgcccgtgattctccatgaatttgccgacataccactcttcgtcgtctttttcatagacagccacgccaccttccagcacttcgaattcttttgtggcgtccgatgttttaatcggagagatcaccgtgatgttgttggcttgcttcacgatacggaccatcagagcacgggcgatagttttggcgctgaccccataagccgctgccagggtagcattgctttccccggaattgctctgagattggatcatctcaatctgctcagtggtcagagatttcaaagaagccggatcaacacccagctcctggtcggacacacgctgtaccattgagcgaggaacgcccaattcgttagcgatagaattctggcttttgccatccttcaacatccgcaaaatacttttttcggtagcagtcatcttgtagttcccactttgtgttagacggggctattatgccccgaggatacgttttgaaatagcggcaaagaacccttctttatcttcttcaataggattctgagccacaggcgtatatgttgacatcaaatgtttcacaaggttatgacaatcaacacggtaacggttctttttcttttgggcctgtgaaatagaacgtgtcgggttgatttcacaataaccgttctctgacagtaattcattgatactggagaacaattgaatcacacgcacctgcccacggcggtgttggtcaaagttctctttgatactaacacggaaatttaatttctccatagccccgttaagatctttgacacctggtaaacctttcttgttcttactgatcgtcttcagataatcccattcactttccggtattaattcaatattattcttatccagctgggatatgttatccttcagataagcaaacttttctggaacgcctccgtgagatttggccagaagcgactccgcatacggaatacggtttatgatacaacgagattgctttcttaatgctaacagttcccgggcattcttagatttgaaagacggcatatggcgtttcagcaacatctcgaacacagcatcaatcgggacaaacacttccgggaatttcttcatcattgggacagatttccgacgggccagaataatccgcttgtgataattcatgaactcaaagattttagttccttcatcatccatcggtgtattgttcatacattcaagaagttcacgagcaacgtattcgttaacacgtttcccgcgaatatcatgaatactgtttgtgcctgagatctcaatatagacgatctgttttccagaatcaatgatattggagatatcttcagcagacagttcttcgtttttatagaaattaaaacggaaccctccaaatgggtacataccagggtctttttcgaccgggggctttacatactgcatttcatgcatgaagtaaacttcacttggtatgaggatttccgaaataacttcgtaaaacttatcggcaaataccaggttgtctatagtggtctcttgtttaccaacccaagattcaaaataggattgaagctcttcgtgattcttgtatgcgcctttatggttttgcaataaattgcgattcgtcagcagtgaatcattgggcttaacaacgatgacaacatcatgattattgcgtgctgtcttgattttcagattacgggcgcggctggagttatcgataatgatagcaacagatttcttctcaccaacccaaccataaacgtcattcagcatgagtgaatccctggattcaaaatacccggcatcccaatatatttcgagataataaggattcccggcagtacggaatggagcgtcaacatccatgttacgttctatatcaggggtgccgttgtaaacatatttccctttgtagaagcgggtgtcagccgggaagtcccgctccatcattttgcggaaaccgctaccgaacatgttagtgaattcgtctttcttcatatacaacgccagcgggcctttgctggccgccaggttgagttcggaaatcttttcctgcataattttattcgccactttcttgaactggcgattcagggtttcgcgagtgtactcatcgtaagacaagtcttcacgggatggtggcacattaagatcaccgagttcaaagaaggtataggacgtcgggaatttttccagaatcaaagaaacatcttgttccagttgttccagatcaatagggtatgacaccccgcccatgaccgcatagtgggtattccccgttcccttcggctggatataggtattccccacccggttgttaaaactgatgtcttcccaatcgaagttgtatgaatgattcgtgactttcgggcgctcgttgggcttcataactttgccaaggcgaatcaactcttcttcgaaggcgcggaagcgactgttcttgaccgggacttttacagacaaaccgttccattcatctgtgtcttccgggagaggctcacgtgtctccagatctttggtgaccaggtctacagtcgggatacggttgctgttcaaatacatcaggaagcgatagaccttcccttcatagcgggattcaacagtgaatgaatccgacacagagaaaggtgatttggaacccaggccgaacgcgccgatttgcccatcatcgtcttctttggtactgttgaacaatgtggtataaagcccaggggaacggatgatttcgccatcttcggttttaaagaccagttggccgccataatacgaagagaaatcaggcacacccaggacttcagaaccttccgggatttcgtcttctttcacgaccatgttgcccgccagaagcacttcatcttcacgggccaaaataggttcacccatgatctgttccagggaaagaccgataccccagtctttgatttccagccatggctcgtaatcgtccgggagatggacttctacgggaacgttagaaggcgccagatacttactatacagttggggcatcggggacagagaggcgtaatgagacggcatccggcgctgtaaacggtcacgcatgttatgagcgtcaatcgcattacaaacggtctcacgaagcgccgccgcttctttataacgataaaggctagagaacaacgtttcaaataacttatctgtcattttaacgttgaagacattacctgcaatagatgatgaagagcggacaaagtgctctgacttgcgcattttcataacgaagaagtcctatcagtttcaaagggattatattggtataatacttggaaatggttcaattgaaaaagcccctgagaaggggctttagttcatattatccgacaagtgatgctcggaagttaaaggtgggacgggtagcgcccggctctaacgtctcttccagataaccgacgtattgtttgacaacttcagtcggctcagcacgattaggtttagcggcactcaaatcgagcagactagatgtcacatcctctacaacggtgcgcttgatctcaaaatggtagcggctcccgaaggcggcgatctcgacttcatgaattttgaagtcagacaattcactgctgttcaacgtaccgatattcaattgtgagcgcagatgctcaacaatgttagaataaatgtactgcggtgtgatcagctgttcaatagaactcataatatatcctctaaatttcgggttcaggtttacttaatcgagcgagttcggctcgaagatacagaatttcatcagccatctgtttcccttcaccaaacatgacatgacactttaccttcctcggctccccttcagatatttcgaggagccgttcttctgttaaagtgtcatcactcatttactcttccttttgttctttccatgcgttttggctttcttcggtcgtttcaccgatgggcgaccatggcctggcgttcccggtccggaattgttggaataccaaatatcatcaccgcgatggcgtgattcctgataactacgcgccaatgcttgttctgcactgataacagcaccagccatagcaatggcgactaatgtctttttggaaaccattatacttctcctttggcggcataggacaacgcctggacgatcatcacagccaacttcatgaaatcatagtcaaaatcacgttccaccaatgctctgatttcatcacgagattggacttctggacaatttttactctgccgacgttcttcctgatcgatcagatctcgcagcatcagaccagtaaaagaatattcgtcaaagttttccagatacttctggatgttagaagcgacgggagttggttcttgtgctcctggttctttcagcgccgccacgatagcatcaatatcccacaaaggattcaacatcaacaacaggttgaccgtcttccctgactccgaagtcggattcttccccagtgcattgtacagggtcttcaaggttttgtcaaatgttagaaccacttgcacaagttcttcataagttggtttggtaggcattagcgtttgctccggcgtttgttattcattttagtagcctggcgtttgtgggcagcggctccacgaaggcgaggcggcttttggtaacgagcatctttcatcatctgacgctcgtctctggatgtttcaataaaatcattgtcatctaatttgcgccttgacttcaggctggtgataagctgtttcacatcagactcagaacagatttcatctagggtcacgatgtgcttgtcgttctcttcacgacgtgccagttcacgagccgacatatgatcttcaatggaaatttgctttatttcccattctggatgaagatcttgtaatgcggccttcatgataatactgtggcgaccacccccgatgataacgatctttttgggttctgacatgattttgctccaaagaaaagggatagagtaataataccctatccctgtttattgaagaattaaccctattcagcttgcgtgtaattcctgtcaccacgcagatcctggacaggggttccaccaaccgccatgatatagatggtgttgatggtttcgaaccacgtcagttctttaacgtctttggtgtatggcgtcaccggaatagaagttttgatttcattcttctcagccaccggatgcgcttcaactagagtaaggaaagcgcagcgcccagacggatggataataccttctttaaacaacacgatctttttgcgaggataggatgcttcccccaggcatacggcaagatggtggatcatttctggccgagttaatagagtgtcatccctgatgataccttgtttaacagctgagataacgatctcgtccagaatcgcctgttgttggtgaagactcatagattcggtaagttttacgctcatgatatcaccctttgaaattaatcggagcctgaacaccagattcaaaagctgcctgggtacggctatcgcttacaacctgacaggtcttttccagatccagacgcgggaaaccaaacattccagccacgatgttgcccgggaactgctggagtcgggtctcatacagctggcacgcatccagttttttggtctggctgatacggaattcatcgcggcccgcgctaatgacgatctggatttctttgtacagagacgaatcgaactggatgttctgttcttgaatccattgcatcaccgctttagaaccgtcggcgccatagcggccttcaaatgttcccttgatgacttccttcaacccgttcttgtacatgtccgggatttgcgccgtttcctgtaccttcagagtataagaactcagatagttctctgagtccttgttgaacttcttaacattgttctccagcgtgttgaagccgttgaacgtgctgataagaaacccggcgatgattgcgataaaaccaacaacagcaccgacggtgataagagcaggactgatactttttgacattttgtagcctcttgtttagaatgggaaacgacgatttagactaaaattatatggcccagcgccaagatagaataatacaccaaacggcacacaaccgagtaaagagacgaccagggcttcccaggtcttcaactcacgccatttcaggtaatccatttccttcatggacacccggttgtaacccttgctgatattggtagcgacttcttggaagactgctatccccattgggtgtcctgtaagagacaaaccgttgcgagaatgcaactccatattgttcataccatcagcgaacgaagtgctcttgccccaatttatcttcatgtccttggcgatatcagtaacgacgatgacatcgttcttcttaccgccagaccatgcatacaccagcccctggaaatattcaatgggctgaccagaagttatcacccagacgatattcacctgacgctcggcacccagagttttcagaacaccgttgagataatcattccagtaatcaacaggaagattcaaaccggacatattcaggactcggttgacacgataataatcatagacctttgggtatgccgggatgtggtctttgaacttctgagcgaattgttcgtctgaacgggagaataatgaatccctgttgcccagaacatagttctgatacggatgatcttgggccgctggttcccctatcttcacctgcgcccagcgcggcggctgacgcaaaccttgtcggtctatgcgtttaatggtcaggtcgccaacagtcgtgtgtacatcccagtcaacgtcgtaatcatgctcatcgcaatagatcgggacacaggactggttgcctttactatccgttgaacatgtctgaccacattgatactggtgctcacaggaaaccttttcccgagtcttgccagtcacgtaaccattaaggatttccacgtcagcagcactccccagggagaatgctgcgtatgcacccgcttgtatcaggcaagataaaccaaccccgataagagtggtatagactgtctccttgacgttgtggtcagcctggtgcctgacgatgaacgctaccgccatcgccaacggtaagatgaaaaagagatagatcataatacaccatccacgagttgggccttggtcatacccagcagttgttctttgtgtttttcatccgcgccattacacacaagaagctcccaacgttcttcatgatacttcggatccatggcctcatcaaatgatagatgatggcggaacatgattgaggccacagaatgaagattgtgtgcggtagctcgttgcagagtccgagttgttgtgatatacggtgtttcgtactcaatccccatgaggtgtaattcacgaataatacgggttggtgacaaatcacctttctcgtaaagttctttgaaaagcgatttcttaggatgtaattggccgtctgtttctttcatgaacagatcgtacaggtattcggtgtattcggtgcgagtcatgattttaatccttgaaaataaaagggaacgagccaaatataagcccattccctttattgaagaaagtaatattgctcagttatttcttcatcaatgacatcagattcacgcttttggggacgggaggactttctaatttcgccgtcagaatattgtgttctttcgcctcccagcgcgtacctttttgcaggtgccaaatatggagggggacgcctgtttcaaagaacaccggcatcttccacttctggacgcctgggacgtgccctgcgggagccttctcgcataacagggtatctggtagccagagtgaacgggcttcccagagtgcggcgcaggagtattccggccagatacgttccatgtagtcgatttcatcccaggtacgctcggcatcccacccgatgtaacgagtgttcttcagacggaagaatttcttcagccaacatgcaccggaggtctcaaagttcagacggttgatgaaagtcagttctccgaactcttctacgcattcacggaaagccttttccaaatcggcttccaggatatcgcattcttcatccgtgatcggacaaccgtcgatctttttcttcccgtgtttggtcacccaatcatcacggttagaaaggaacgccgcgccattgcggtttgattcactgccatcgcgatcacgcagcataaacccaggaacgtcaatctgccacatgttcccgaacaccatgttcagggcttccaggaagttccaggcgctcaggcggccgaagtatttccaggacattgccgtgtcccacaactcagtaaactggtcttctttcatggtgcattccagcatccaacggaaagaatccatctgagttttaccacccagccaatccacataggactgaacacatgggatcatcttcgacttgcggtagcgacaatcagtatcgaagcgcatgcgctcaaagttcaggttataccaatcacagaagcgctgcatttcttctttagtctgaggcggaaccggaaactcagaatagattgtccacgggccgatagcattatagcagcaaccccaaaggaacgacatccagatcttgcgctcgatcttttccagattggtgatgccttccgtgacttcaatagcataatccatcagacgcatctgctggttatgctcttcagtgtaggacagcgcttccacccaagccttgagcagatacatccggttttcaggcttgcgataatcaaccttcagatcgatgggatacttccattgctcaggggctttatacccctgcggcattttagataaatgggtcatacatcaatccttttcgccgacggaacttgaaagttcttcatctccaggatgaggctgaactggctccagctggatttgttccgcagtaaccgggccaagttctgagtgccaaatgtctacgaagcgcttatcagaagtcacaacccacatgcgcttggctttattggaacggtcggcaatgaatgcctgggcgttggcgttggtgcggacgaggccaacctggcgccactgaccgaaatctttagacgcggggttagtgttcagctgaaactgcgggataacccggttatcttccggataataacggacagcattgatcatcttggcatcgcccttataatcaatagcgatagccacggcatcgcggggaatcaaaattttcatctcatttccttaaaaataatttatagacaacaggtatcaagaacgataagaagccgaaccagtaaaccacattcatggttttcttttctgcttctgacagatcaatgaaaccataatgatatactatcatggttaataatgaggctaaacaagtgatcgccccgaccaataaaattgcatccaaccacttgttgttcatcttcatttcctcaacatcatagccagcacgttagaacttttggacagctgtttcttttcatcagccgtcttcttgacagtcgggcggcgggtagccttttccggtacacgatgcgccagcgggtctgaaccaccaacttcccgcgtcattggatggtcttcgcaatacttatagaattctttgaagacgaaccccgcgtcacggacttcattgatgatcatgtgatgaatggcattaccaatcacccacagcggtgcgtcgaatggcaattgggcaacttcgctgccaacgccgttctttttgtagaggacgtcctgaccgctgtatgaatctacaacgacatcccagcccgctgacgccatttcagatttagacttttcaaactctttctgataagactcgttgcgagtccagccggaatccccggcttctttaccagaacgccctcgtatccgggcgtcatactgataacgatccggataagtgaaatacaacagcgccaactgttcgatggggtaattggcaaacatccattctggacgccacttatcagacagcatcagcggttcaccctcacagaccagcgtataccccgcgctgagatgttctttgaccagttcgcgggcgatatcaccagaacccgtcgcggcatggatagcgtccatcgaggtccacgaggcaaggccggatttatttgacacggtgtactggccgacgaacatcagtttcagttcttcaaaggccagaccaaacaggcgcgttttatcgccgatggtataagtgacctctcgaggctccaggcgggtacgcagccattcgatgaactggacgacacgagttcctttgccgccacccgaggttcctttgattacgattaatttagccatttattattctccacccaagacatgttttagccctacctttcaacaggttcgttatattaccggaagggagaccatattgaagttccatatcacatcttcttaattcaacgatgcgaccatctttgtgttgccatttgtaaattgtttcatcacgaccaggaccaatatctatcagaccaagggcatgcaggcgttttcttgtttttcctccacaaatataagattctggtgatggcctaggaggttttggtatcttgccttctgacattaattggctcagaatctttccctttctaagttccgcttcaggtgtgagtctgggcggcggcttaatcttaccttctgctatcagacgtttgcgggttgcagcactctttgcggatgatgctggagtagccaaaggcggctttccgccaccgacaaccatattgtagcaccatccgctgtcgatcacttcttggcaaaccaattcagattctatttcaaggataaccgaatctttaccccgaaacagaacttcaaatctaaattgggtttcaccatatttcttaaacgcacgttgtaatgcgatgctaccctggccactcttatgctcggccaaccgcctatccggttcagaagtgacaccgatatagaatttatggttggcgaggttagtgataaggtagagcgacagcattagttgtcgtcctcaattcgccatgatacaccgccaagccaaggagaccaaaatacagcgacctgctggcgaccatcttcaacatatttgactttatactggtcatcaaagttatagaatatttcttcgtcatcaggagacattccattctcactcaggacgcgcttcagttctttagccgccccaacagaggatggattctcttgggaacggatgtagttgttgatatggatgatgacaccttccatatcactattccctgagagtttgacagggaattctaccactttcagcaattcgttagacacttcagactccttgacggacaaattggtaatgtgcaaccaggcggtcaacgacttctgtaaagttctcgcgcagataatcgaagtggttgcggccttctactggtttaacatatatcatatcttccgaattcgaaagatccagtttttcataattcccctgagggacgaatatgctgaaaacattgttccagatgcacgggtcgacatatttcgggttgtcgtcaatcaaaacatcgccagcgaccatatgcttttcatcagtgctgatgaagccattgaagatgttcgggaacttttcatacacaaactggcgtttgctgcgttcatgctcgggttcacatttggtgacagcaacaaattccaccatttcaaacttcatgagcagcgcatcacgcaagttgttcaggaactctaccgcgccgggtaacggctgcatacgagaatacagatcgggctggcgccagaagtccatcggatcccgtccgcttgggataaaatgttcttggctaccgatatggacatatgagtgagtccacgcccgatgcgcgcgttcacgcatgaggattgccagatccccagcatggttcatataacattgcttggtgataggctgaaatttagcagggccaacaatcccatccgggatactcgcttgggcttccaggtttccgtcattaaaccacttcacccaaggcgacaggctatcaaccattgtcaggtcaacatccaccaaaacccggtacagaccaccgacctttgaattcatatcgtaaaggcaagacagattgttcatttgtcttcctccactttgtcataacccgttgcattgcactgctctgcggtgcagtcggcatacagaacgacagaagcctgcttcacgtaagtggtgcagtgataggtctcgtcttcctgaatggaatcgtcatagttgcagacggtttgcaacgggcctggggtggcgttgtccagagcggtatgtgctttgatggtgtcttccatcttggctacagcttgttcattggtgaatgtcggcgcatccaggtccacagtagacgctacatccagcagggtagaacacgcagtggtagaaaatgccagagcacacaccaagaggatcttattgagtttcattttaaatcacctattctttgtcaaagggaaacaacaggggaattatatccccctgtcggttattgaatcaacttttcttacccatcatcgccaatagatttactcgacgtttatgagaccagccaacgaccgtcagtatagactgaatcggttcaatgaatgacttctcaaatgccgtgttgtagtctacccatttcgccatatctaattcttcagggaagaactcgggataggcgaaatagttctgaccgaaaggattcccggccttgagcagcacgatgttgaccttatcacctgattcaatcaatggtaaatcgagttcttcatgcttctctaccagacggttgtagccgacgcatgccttggcggcaaagtgtgcaccagagataaaggaaccatcaggagcgacgcacttctcaatatcagatacaccagaagccttcgcgatatcatcgacgctcagtttcatgtactcatctttatacgtcttaatgaggtcttggacttcactttcggtgcctaagagaatgcgctcatagcacttgatgagacgctcgcggcaccattcgggggttgttgatttgcgcgcttcaagccctttgaatttaatcttcggcttctcatacttgatcccttcactatcatagaccgccatgcaatacatcttcttggcacgccataccgcagccgacgcaatgacttcacgctcccaaaccatgcgttgttcgtagccattcatcgtattacacagcatctgcgcccattcattggttttaggctggtaattctctttgatccattggtcgatgttatcaacgagtttgtggtgatcagtttccccttcccacaatttcttgaccaggcgctcaatacagatatagttcgagtccgtgtcccccgcgataacatagtccaggccgctggtcccgcacaatccgttgaggtaatcatcagtgtaacgcttgttccacttgttaatcaactgacccgatgttgtaatcgcttctgcgatgttaaggttaaagtattctttaaaccagacgttagagatagcgccataacctgcgttcatcaagatcttgagaccttgctgtaatgtatcttgggcgacgccgaggtcttcccatttgtgcattacttcggacagatggtcaaggtcgatgttcttgtgctcttcataccaatcttggtcaaagtagcgggacttcatcgcagactcaaggtggaagtcacccttggacatttccttacaccagcccgcccactgctcatacttcagacccttggccttctctcctttacgatcagcgtaaatgccgcgcataatctcggacaggaaggacatcttctcattgctgaagaactgaacgttcggcgtaaacgaaacgttgtaacgcacaagggtttcaaaacggaattcacccaaggccaccagttcatccacaacctgcaggcgttcatcgatcgcgcggagcagtttgtcgtgtaggttcttcatatggcgacgtttgtgcatcggtgtcgtcatatcgttcatcttagcagcaagctcttcacacatggcttcaatgatttcacgacgggtatgtttatcgccgataatcgtttcagggccaaggttgtactgctgaatgatgtgtggatacagggagttcaagtcctctgagaagacccaataatagatccctggcgcgacctccatgacatacgcgccttcaaagtttgtcggcccatcatagacgcgctggactttggggacaatccccttttcgtacagcttgtaataacacatggccaaccatggtgctaccgtacccaagccgtcttcaaagttagacttggtgcgatatgccagaacaaacatcagctggataagacgcagtttttgttccagacgccacacgagtttgacgtccttgataccataccgggtatgcttacagtaatcattgaagtacagatcaaacagcgatttactctcactgtaatccatcttcttctcaccgagttcgcaatacgcaatccagtccagagaataccgctcgcgggttgtgtacgtgtgctttttgtaaacctgcaggtaatccaacataggacaaccgacgaactgatacgtcgtgatgtcgcccttcttatcccggatgatacgcttcttgatcttaccccagggactcaggcgattggtgtcggcttcacccaatacttgcatacagcgttccaccaggtacgggctatcgaattgctcgatgttccagcctgtccagccgtcaaaggcccgcgcttcccagtaatcaacaaaggaccgcagaagatcttgttcggtggtgaactcttgatattctacttccagaccaccgatctcttcatcgtttgggtcatatttgaacttatgacgatccttagaacatggcatcccccagaccatatatttgttattggtcagatcctggagctgaatgagcgtaatagggaacgcagcattcatgttctgagtgatcttaccgtttgcgtcaatgatggggaactggtcggtcacgttgttggagataaaggagccggggaaatgctcgcggacgaatgcatggttggccaggatacgtttatggaattgacggacacgcgccgcgctccctttgaacgtctggagttctatcgtcgggtgcgggaatgggcctttagtcatctgcccatcaacccaccctgccgagaacacttcgatatcaagattagcgatatggatgttgttataatctggttggattgtaccggggaaactgtgggcgatgaattgataggcatagtcggtctgaccatatatcgccgcgccttctacatccttgtattcctccatatagttgtcggcgtcacgcatagacgcaaacttcttagaaatcagaggttcgttcaacaggccgactttttcaacattagaataatcagccgtgggtaaatacagagtgggttcgaatttctttttgagcatgcggcggttgcccatgtcatctgcaattcgaactaacaggtcgttgccttgccgggcgacgttagtatagaaaacagtcattgtattctccaggttatccgtgccgttagcacgtccccataatttagccgaggagggttcattgaccaaggagtttatatggcaatccccttggtaagcatgattcctggtgcgttcaaacagctctggaatctgggcactgatttgattcaatataagcgggaaatagtaagcgccaagcatgatgtcaagatagaagcgatcaaatcgtcttctgactgggaactatctaagatcacagaagtcggtgggtcttggaaagatgagttctggactatcgttcttgcgatccccgcgatcctcgttatgttagctcctgttgtggaactgcttttgttccccggcgaatatcataaaggggatttcatcaaagcagtagtcggtggcatgcaagccttagataccgcacctgattggtatactgcttcattattgacagcaattagtgcatcattcggtatcaaaggctacaaccactttaaaagcaacagccgcaaggcgcaagctgtcgatgcccttaaacaattcggcgtcaaagtggttagcaaagatcccactgttgttactcagtcgggttctcccgatcttgagtctgctcccccagctgggtctactgcgacctctggtgcgtggcctgatctgaagaaataaggttcaaggggcttcggcccctttcttttggtgttaaggaatggatgtggtaaacaagagattgctcgtcacccagggcggggcgacgatagtaagaggccggatttatgaacaaactaaactcggatcacataagacccgattgaaagtcaaggcaccagatggtggttggcccacaaacgtgattgttcccgatggcctgatagaacgagggtttgcgacgtacagaggggcagagttcaaaatttattaaaatatttattgaaaaactttacttattcaataactggcgtatacttcaaattgtagtacgaacaaacaacaaactgaagagaaggaaatacatcatgggcatcgaaatcatcgttcaatcaaaatcaggcaaaacagtaatgtacggcactgaagaaggtcgctgcatcattaactacggcaccatcactggtgaagcgccagagaaaggcggtcgctatctggttgaatatggttcacgtgtcctgatggtgagcaaagtagatggccgtgaaattatgattccgcgtaaagaatactttgattctcgggttgaagccatgcaattcttcctgttccagcagcgccatgaacgctttgtagaagccaaagacgccgggctggacgatgcaactgccgaactgatcgccgaaggcaaaatgactcttgaagccgctctgggtgatatggacatggacgccgaagcgcactggattgaatactctgcgtatcagaacgaatgcgaagatgatccagaagatgacgggtttgacccagacctccacggcggtgaagacgacaatactccttctctggaaattctgatggcaggtggtcaggccgcttgggaatggcagaacgaaaagaatgcctggctggatagccgcctctaatatcaggtaaagcccctccgggggcttcctctcaaactttgaaacgaaggactatattatgacaatgcctaaaactgctgtgcgccttgcggtcgagcctctcttatcacaggctgaagacgccgctgtcatctcggcaaacaatattatcgccaaagtgatgacagatcttgaatcccatgggtgggacatcaacaaagctgctccctggccgtcttctgttgggatccgtttagggcatcccgattataataagatgaagtcaaagcatgctctatatcactccctgattcagcttgtgtcttcaacatatcaaccgggacaacctgagattgtcaaggcggatgaagaccgccaaaaacgtttcattgaagaagcccgccggaatgcggcgttgcaatatgagtctttcatctgtaaattagaagacaaaatcggtgggcatagcgctgctaccctagaaggttctcatgtctggggatattcaatactgacagtgacaaccccagagggaattcaacgctggaagacacagacgattgttaacgtctctgtcctgggcaaactcttcaaccaatatcctactcgtcgggtgaaataatgaaaaattttgcagaagaactccaaacaaccattgacgaatataacgcttgggcagcaaagaattttgttgagaaggcagtggatatttttgtccaagaggtaaaagaagacatgatatctcaggccaaacgtggtattcagattgatgacatggggattgtcgttggagggtatgactttgataaaatctattcagctttttatcaagtacaaagaaaagacgtatgtccaacagagaaacaacttaaaaagttcaaatcattattaagtgagaaaatgatgcaagatggcctaaaatttgaattccgtaaaagtaaaagaacggaattaattacgatggtgttcactgtctattcgaacgatatctaaaaagaaggggctttcgcccctttttcttattcccagaaatcatcgtcatcatcgacgtcagccaattcagtatccagatcttcatccgaatactccggcagtttaccattctgtttcaaatattcgatctcatcatcttcgagctgcaggtcggtggcgatataaagtgcatcgctttcttcgtcgtgctcaatgctgtacgacgtatattccatgccctgaacggtaatgatgatgctggtcggatcatcggggtcgacgtgtgcctcgaaaggaactccatcaatcggagcgtcttccaggaaagttgccagggcgatagcagcacgaacaacgtcggtgccttctacggacgcatagatctcttcggcgccagtttccccgcgctcaaaaaattctatggttgtgccgtcttgaacgccagtccagattggagcgtccagtattgactcagattcgaataaagtggagattgccatgtcagtgatcctcagtgtggattatggggtatttaggcttcccccgtccgcaccgcgataccagatttgtataacaccatctcaacaatcatcgtatcgtctagagaaacaacagagtcataacccatatccatcaaagcacgagcattttcatgaacagtacccggaggaatatctaattccctcatcttgtcttcccaaacggatacattattggaatgtaggaccagagttctccgaggattcaccctaaagacaagaacatgtggttcaccaaactggcgataacgagtagcattttccgcatactgaagagcgacttctggttttcctgtcagatagaaccccggccccattgtcccggcgtcagtctgtccaaacttcttaaagtcgaattcatcaaaaacaacattggatccatgatacaactccaaatttgtcatatctgggacggcatcatgataaaagaattccaaaaaggttttcataaaataccccacacggtttgtatggggtatttaggagggatcagttaccaccaggacagaacacgttcccgcagagaggaccaccatcattatctctgcgaccacaagtgctacagaaaccgccataattcggcttctgcttgagtggagaaacgtttttctgttgagggacgactttctttattttcattcaggtttaaactcattcacaggaacattttcagggataaccaactcaggacatgctgccttcatcggttctatatacggcttactaccaacgatccagaacagagagttctcgttcaacaactctggtttgtgttcttggatccacgtcattaccttgccttcatagcgaggatgaagttcgatgtcaccccattggtattccatcagatcgttgtaacgaacccaattggtggtgtgcaaatcccagtgatgaacattaaagcgcggagaaccagtccctctctccagttctttcgggtcgtaacgacctaacaggccaagcagtgaaacgctcttaggggaatgcggagcgtccttcttaccatacagataatccgggttgtcatgataatggcgagtgaagtccacaatgtgcggtaaattggcatattcaccaataatgcgcagacgactttcaatgaagtcaaggcgattaggaccgatgccgatcaggtacacatttttcagattcggtttcgggtgcatcgccaggcccgtcaagatactggtgcaagagttacatgaacctgccgggataatcagatcggtaatatgatccgggatgttggcaacttgctcgccaccgagcatatggaagccagcgatgcgctccggggaatgcaatttatggtccagagtgatcccatactccagataatacgcctttggattctgttgttcaatcagcttcttacagcgaggctgaatggtgctgttataaccagaaccgacgaaattgaagacgctaccgaaccatgccgacattgctaccatgtcatggttcatgcaagtggttggcttggttgcacccaggactgtagtcgtatgcccgccgaagtgccgagagactgccgtcgccataggggactgcggactaccaacgacagtaccatggatgatatcgggggagcctccggccttaatatgctcaaccatgagccagatagcctgacggagtttgctgccgttgataccctgttgtccgtttgcatagttggacagcggcgcgaagtaatcttcacgtttgaaccagacctgttggttggttacggggttggcaacgagttcacatggggtgtgtttatagagataatcttcccagtgcaccagatttcggtccagggatagggtgttgaatattgacttgttgtggtgttgggagatcacaccttcagtttgggtatcgttcattctatttctcctgtagacattggcatatcatagcgtatctacaggagtatagaaaaggagaatctcggttactttctgaagatatccaggaacttcagaatctgagacataaagcctccccgcttacgtccggctgaaatctttttagattcagaactgtcatgacgtaattgacgagacaaagaatcatcatctttgacgacacgagtttttggaggcacaggcggagctggcggcaccggaacttcacgactacgaaccatggtttcatagtcacgggcgatctcaatatatttccgacgctcagtgaagaaatcaactgccttcactttccggcggcgggcatgagaactttcttcgccatagtaatcgtaattgttacgaaccatccagttcactgcttgttcaaacgtattgaacaccagcatgggaatgccgtcgcctttctcaatacaatccagcgaagagtacccgacaatgacggtcatacctttctggaacaatttacacgggatgacgttaccgggagcattgcgatcgcgggggacgatatggtcttcgcggtgcacgaagttcggatataagaactcattgagagtccctttgtaacccttgtaagtgtacatacggacaaagggaggaacgtcggcgaccacgtcgttcagttcccagatagtaacattgcgcatcagtatttcctcagttcatattggacaataaattatagcgtgaatcggttatagattaacctatctgggattcagaattatacgcaaaaagaagcccggtatccttaccgggctttgttaaagacaacataaacgcagtttgctacacagattatagggagagtgcgccgggaatcgaacccagagtcatcagaacttagaaagctatgtgcatttcactgacggttctgtgatttattcttcctaaactccagattaagaaacaggggcatgcacaccttactgttcccgcaggaagtcgcacccataatttggaaggagcaccaggattcgaacctgagatcatgggatcaaagcccattgccttaccgcttggctatgctcctgcaatttggtgcccgttagaggagttgaacctcagcgccatggtgatcaacccacagcgtcttgcctcatccatttgataaccagttcagatcttgcaaaatctaagctgatcgtctacaaacagactgcttgaccgagcatatttggacgggcttctcacccgattgtgcatttgatctgccgtagcccaactccccgcgccgtaacgccgattggttaactggcaccagtgccttctggtgtgatcccttggaactttacaggcatcgcgcccgaccatttctggtagttgtggcatcgtttccgatgtagggttcccccatttttaacacagctggctgcaacgcttaccgtgtttgtatcagagtgtccggtgtagcctctccgtgaggtgcgcactactgtagcctctacactctgaatttgtatgatgccacaccacgtctggtttgttgaatccaggattcgaacctgggatacctgccttacaggcgagtcgctttgcctcagcgttattcaactggcatcaatttggtggatgctactttcgtcggtttcagattccgttcggctattggacgttgttccaaagaacttgtcggtcgcgtacttcgtgcttactcgctttcgtttcacacccattgtctggcgatggtggcaggactcgaacctgcgacatacgatttaacagaccgccgttctaccgactgaactacaccatcatcaatttggcggaagatacaggattcgaacctgtgcaacctttcggttgtacaccttagcagggtgctgcaataccgctctgccaatcttcctatttattcgcttctatggctcgaagttgcttttcagcgtcttctttggagtcatgggttcccaggactttcgtcttggtatgatcaagaacaacccaatgatcaccacgcttttcaacaaactcaacaatttctttgttgtcagtagccagaccatcccactcagtaagaaactcaccgaacgttttcatcatactcaccaattgcttattgaacaactggtttatttaggtgctcccgaggcggtatttaaatcccgcgatcccatctcgcctgccgtagaccagagcatgttggcagtccaacaatatttggcggggtctgaggcttttcacctcacctgctggattggcctccagctgttctctctggggactcgctgtccggacagctatcccttaaactatcgccccttaatatggtggtcctggttgggtttgaaccaacgaccaatgaattatgagttcactgctcttaccactgagctacaggaccttctgattctttaaattgtctagtacatgtggattagatttcaacatcttcttcatgttgtcctctttactcaacaactgcaaattccacagagcgcaattgtacttatcttcattaatatggtctatttcaaacccttcaggaacaggcccattaaacgctacccaaacaaaccattgtaaatattttctgagatattctcccatatattctactttgatttgcaaatatccagtcccgttatccaccccgaccagatacttttcaggaagtttttgttcatattccctaaactgatttttacggcgtatgaccaattctggctttttaatttttccatagttgctaacaaaaatgttaataccaagtttgtctaaatacaactctttccaaatctcttccatactgaccaacgcctcacaatttatgtgtgcccaaccaagggctgctagaccttttatcccgtttgcgcatgatcagttcatgcgagtcttatcaagcaccttacggcaactcttctggatgtcatcgccctgctgccaggctcatcccaggagtttatttttccagggctttccacttacaagtcttaaccagaccgggatacgggcttgtaagatcgggttggacacaactttgaggacactgacgacgtctactagtcacccataactgatattcggatgccagtatcctcaaagttgcaaccaatgtcgcaactcgcacctaagtgaaagtcaggcacttgtctattcgctagaccaggctgtttggtgtcgggtgcctcccgatgaccttaccacggaaaataaggccgggtgtgatgaaaccatcagactcaaggagatgagactattccgttccctcttgcgcttagcagaattcaccaaacatagcagcatctatacagaagcaacttgtcctctaacgctcggaccaaacgaggctggctggttgattcagagccgctggttgctccagcaagcatgggttgatagcccggcaacatagaatcacccaaagatgaagaacactcagtggtacaagccagggataccaattttcaggtccttcgcgagttctttaatgctcttcattttgtgaacttgagaatactacgcctgtctcaggtttccccttagttcggcctcccagtcctcgccgcgccgggtagctaaccctgatggctcgtctgctactgagttcttcttggtgcccaccagtgtccggaatgtgtaggcatcgcaatctgcaaggcatggtctttttcacccaatgctctctcaagttcacaaatcgaagtgccctgactcaacagttgtggcccaacatattgttatcgtctaccgggctggccgtccactttgtagatcaacctttgggtttaagataaattgtcagggcacttcgatttgggtgcccttcacctgccagggatcagggctgatagcaagacttcgctcacatctttcaagatactcgttagaataccttcaaagatgcggaggtcggacccaaatttaacaatccattcaactgataacttcaggggaccactctcatttccccacatttcgaccgcccgggacagtttagtggtacgtcacttggtctgttacacggtaggagccgattctccctcgaattacctcttgtttgtatgcctacaaacaatttcacagattgctgacaagttatcatgtgaatgaattgtcattttgtggtgaccggtgctgatctccggcgttcagtcaagctgtttgaccgagcaatttataatccatgctgtatggatagcgcatcagcctgcgcattcaccacaactaagagagtattggtcgcccggatggtattcgcgtctaccggttttcaccttgttcaatactctcttagttgtgtgcccattattaatcacaccgggccagtgcgccgaatttggtgatgagtaatcggaagacctcactggtgtatggctattaagctactgccaggaacgtattatcgtttgcatttatctttgtggtcagtttctaaaaacccgcaaagtcgcgcacaacgagaacgaaaacctgtttgagcacaagacgccatgtcctgggttcacatcgaagtgtttgtctaatgcccaaacagcttttcgttcagtgggttaactatactttgttaacccttattgacaaaactttttattttgttggcgaggatgtggaatcgaaccacatttgcgggagctaccccggcgtcaacctatgcaccacctcgccatcgatatgccggaacttacgcatccggcctcgtcctgttggcgctcctagaatccgggaagacagtaggaacaattatgttaccaacaggaaacctttgtgttgccctttgacgcaacattatgaaccctcgttagaagactcataatgttgtcggtgtgatgaggattaccagccctcgaccttcccatcatgcggtgtcgactcgccgccgggttgctctcgttcctctcctgtagatcgatccctgcatgaacgcataggcaaccaacagtggtaactttctgagctaatcacactttcaacagggagtttcgttctccgacggttggtgcgtccaccaacaccagcagggttactgcgctgcctctattcacacaagcccctgagactaggggttaactggtttcgggttcaagcctactcccactgtgttgtttcccttgaaattttatgatactgcaacacggctaatttgaaaagtcctctcctcttgagcaacaggacctgaaatcctgcggcgaacctctgctcaaaacccggtgcgctatcgaaggcgctttaccagagtaaacatcgggtgttcccaggagagtgaaggccatcccgatgatgaggataaggagtaacgctatgattgtcatactgttccctcccttccatgcaacttactttactgtaattctgtattgaataaagcgttattttaccacagaaaacttcacaaccttctctaggataaacacatattcctgagcagctgcattcgacatataatgcgtagacggaatagaatgtgaattcgttgtttcgcccagattaacacggtcacaccagccattgatggcattaccgtagaagccgatgatcgcaacgaagtagatgcgctggctttctggttccagaacatagttgatcgtgaacgcagtgtccgtgcggacggcttccagtttgatcccaatacgacattccggcatgttgggacgaacatataaatgacggaagcggtcgcggcgggcggtggaagattgttccagttcgttgcggaactcactcgtgacgtcgatgttaaatgaaaaggtgttgtgtttcatatcggaacgagcaagggaaaccgcattgtcgataacgcgacggaaatttacccctttatttgtcaggagtttaacttcctcagcaattgtcgtcaaagaaattttggtggcttgttgtccttcatatttttctaataaaggaatgatgtgtttcataactgcggtgttaatgtgcataataagatcctcttgtagaattgaaataaacgccatcattataatagaacgaatgttattgaatattggtctctaaattacaggagtgttttattaataggcagaaactacttttctaacacatctctagactgtatgctaacgctgtgcccttcgagttgtgagtgtcaacgaacaacgagaagcagcctccctggctgtggaagggtgccagcccgcacagggcggtcttacgagcgaagcgagttgattaatatatttgataataacgcgcgcgagaacaaattcctttctctgtcttcaacagctaaatatctccaacaccatattcaaacttgtgtgacggagatcaacatggctacacaaacagttccttcactcgacgtcagggctttcgaatacattatcaaacagcgtatgaaagctgatccgaccttcaaggattatgactttgaaggatctggtcttagcgctatcatccgtctgctcgcctctgacgcgaatgctatcggctttatgcaaaacatgctgaacggagaaagtcacctccaatcagcccaacaacgttctaatgttggcttgtcatctgcattcttgtcgtacacccctgagaactatcaggcggcgtacatgtatgcaaatgttaaagtcaccccctacgatgcgaccacagcaccaagcgaaatcatcatggatcgcaaggttatgtttgttggggccaaagatgggaagtcttacaacttcaccgttgaaaaacctgtgtccacaaccctgcgaccagaaggatattatctttttgagaatgtaaaactcattcagggtgattggctttacaaaacgtatgatgttgaaggtagcgcgatcagtacatacaagatcccatctactaatgtagatatcaaccatctggttgtcaacgtgcaggaatctgagacttctgatgtttcttacacgtttgatcgttacaacagtccgtttgatctgaatcaatacgctcgtctttatttcgtagaattgggccttgatggcttctacacttttgaattcggggatggttatatttgtcgtcgcgttgaagatgggaacgtcgtgttcttacagtatctggagacttccggcgcggatggcaacgatatcacttctgtttcatcggcgactgcgattgctgggaacaacctggtggatatcgaactcgtatctgagagaagtgtgggtggttctgacccagagtccattgaggacaccaagcgtctcgctcctctgagctatcaggcggacggcgcagcagtggctgaaacagattatgcctacctgacagagaaactcttctcgaacgttctacgcgctaaaggctatggtggtgatacccttaacccgccagaccctggttacgtctacatagcagtaatcccaaccgtgggggaaacactttctgacgcggagaaagctgacattgtgtctacccttgacaaatataatgtcggttctataaccccgaaggtcgtggatgctgaggtcacgtatatccaggttaacaccacgatattctgggaccctactgccacagcttatgctgaagacggtctgaaaactctcgtcaaaaaaggtgtcgtgacttggggaaccaacaatcttgacaattttgatgagttgtttgacaaagaagtgttgcaaaccgccataactgatatggagcgttccatcgtttccaatatcacttccgtcgcatacaagcgtcacttcaaaccggaatatggtgtcctcgacagcttcactttcaatttcgggcgatccatcaaatctggttcggttgttatcaatggattcaagccacttcctgctgaagttgacttcacttattacatccgggatgtaaatggtgttctcaatatgtacaaagtcagcacttctgatacgacgaaggaatatctggtgcaggctgttggtgtcgttgattacgcaaacggcgtcgttgaactccagcagatcacggtatccaattatgatgaaggcggcgcggctgttgtcgtatcccctgatggtttaaaccagaatattcaggttacatctaaccaggttcttcgtattggtgatgtggccgtagacgcggaggtccgctatgtccaaagatcttaataacggacatctgggcgtcaaatatgagacgccgttgttctaccagaacgatttccctctgttcatcgagttcatggatacgttcttcaattggctatatcgccaaaacggtttcactgaagaagaaatccttgcatatctggcggacaccagttggctgaacccggctagtgacgccagtccgctcatgcagctggtagacctcaagatacagaagacgccgggtactgctgcgcgggatatgcttcttgacaaatatttggtcaggacatttgagcaaatgatggcccttgatacagaagagttgttggattctgatgggcgtccgctcttttcccctgaggacaagaactcgagcattgatgcctggtataaagaatttgggtttcagcgcacagttgataaatcttttcctgaatttgggttctttgttccagaaggttctggtggtcttgttacggctgacggtaatcagttctccgtttacatcgaggggacgcgccgccgaacgctggatcatacccgttggctgaaattgttgaagcatatctataaaatacggggtacgcagaaagcgatagaattgttcttttggatttatttcggtgttcctgttactgtgtattatccaaaagaagatttggctggtctggatgctaactttgattgtgatggtgaagttggtcttcgtgatgattactattatgacgaatacacatatgtcataagaatacctggcgatgtagcagattttgaaggtgtattcgagcgcgtgttccgccaacacttccatccatctggtttcaaagtattcctcgaaagcactaggagttaagaaaatggctgattatctgagcaaatatacaggccagcagatagataatattctagatgcggtcgatggaaaattaaacaaaactgatgtcgtaaatgatatcacggtagatgacgatctgtccccggcgtcagcacatcttacgttcgtcttgaaatctgctattgatacaatgaacgatgttttgagcaacaaagtcgttcgaaccgatggacaagaacaaacgataaacgggaaaaagtcgtttgcatcagtgctgaatgcaaacggtggcatcttagttccgactcaacgttccataacgatcacggatgaacctgcggccaacacagatgcggtgaatctcagcatgttgaaaaaacacgggctgagcactgttgactccgttggtacggggtcgggtcttaaaatttcattgcttttgaacggatacaacaaattggaagttgatctttctaatcttgttgtaaggactgactcggcacttcctcagtctctggccgtgtactcgccaacgggtgggtctcaaatatggtctatgacaagtctgttcaacagcgtattcgcggacactcgtttcaacgattacgtgaaggttgcggattatgattcagatatgctgaacattgaaacgcaattcactagcgtcaacaaccgcataaatctgaaactggatacatccacttatacggcgaaaatgaccagtctggattctcagatagcgaatttacaatctgggaaagtggacaatacgacgtatacggcgaaaatgacgagccttgacagccaaatcagtggtctgtctacgaataaggtggataaatccacgtatgacaccaaaatggctagtttagacggtcaaatcagtgatctgtcttcaaacaaagtcgacgtgtcgacgtatactactgatatgaacgccgtgaatttggcactggcgggttcggtaaaattggccaaaaccaacaccaccagtacttctgtcccggcatctggtagcgcttcattgccagatttcactttggtgaatctgtgtcaaattttgattacggccaaatggggcacattggttgatacgttcttggttacaatgacgtatgacggtactcttcaggcgacatctttgacacaaaaaagtacggcagggactttgtcattcgcaggttctgttgtttcaggtaaactgcgtctgacaatgaccaacgctaatacaacaaccgcagcatctgttgattactcacttcgtgcttctttctaaatcttaaactaaatacccctagacgattacatgtgctaggggtattttcaaatggctaataaacccacgaaaccaaattttccgcttgggcttgaatcacaagaacaatccgtatttcaagaaggtattctgaataatggtgttgtagaacatggcccagatgcggtaatgactgtgccagaaacccctgatgcttctggggttccttctgctgtccgttacaacgaagacgacgatcaattcgaaggctattacaacgaaggcggctggttgccgcttggtgggggcaacggtgggcgctgggaactccttccgcatgccccttcatccttattacagattggccgtgcatatctggtggataacatcgacggtgcctctacggtggttttccctccccctaaacgggttggtgatagcatcactgtgtgtgacctttttggtaaattctcaacttatcctctgactgtcgacggcaacggtaaatcgatctatggctctgcggatagcatgacgatttctaccgataatgtcagtgcaactttcacatggactggtgaagcccgtggctgggttatcacatcgggtgtcggtctgggccaaggccgagtttacagccgcgaaatctatagccaaatcctgtcagcgacgacaccatctattaccctgagcacccaaccatctattgtagatgtgtatgttgacggaaaacgtttgaaagaatccttgtatactctcgacgggtatgaagtcaaattcgatccggcgttggcctctggttctgatgtgcagattattcagtatatcccaattcagcttggcgcgggcggcgggggttctggtggtactgtaatcacctgggaatacaacggtggttcagccatcggcggtgagacgcagatcgtattggacgtggtcgttgactcagtatctgagatctacatccgtggttctcgtcaacagatagggcgcgggttcacatttgatcctgccaccagtacgattactctggcggatgaactggaagccggggatgatgttgtcgtcgttattaatggcgacccaacggtttacaatcaaatcgatcgttcaccacaagaagtggcacgggccaataacgtcaaaaactctgaagttattctcagcactgaaacgaatacaattttagatggcaagaatattgtttatgacgtggtagctcaaactagttggagaatcccgacaggaataccagcgggtgcgaaaataaaccgtgttatcgggaatattttggtgtatacgccaggtaacgtcagcgtaacactgatagaaatcccttcggcttattctctaaaatctcaattaggttctgattacggatcttttttgctcaatgccaaaagaaaacctttgggtgaagctgtacttgcagtatctactgcaggcttgttatacagttcttcctgggttagtattatggaatatgcccatctggttaccaatcgcccagatccaaatgaccaaaccacttggatttgggacccagcagtacaagcatatttcgacgatactgttactttgattaatcaaacccctgtcaactccggtatgaaagctaaattcccgctggtgctaccgccaggggtattcaaaattgaaaatagttatttgctggaacggataggggctagtgcggggagtctcgccaccatctttatgatcgttggttcaggggtgacgtcgactattatccaaccgatgacagaagggcagacggcatttaccgcgcaggactgtaaaatcaacttcagggacatcggattccgttctggtgctgattatcagacatgtttggtgttgggaaacaaaactaactggaaaccagttttccattgtaacatgactcgcgtgggtgcgtctggattcggtcgggggttggtgatttacctcgcattcgattcaacctttgaggatatatttatacagaatatatctaaaatggatgttgcaggcactcaagtttcctatggtataaccatagaaaaatatgaggggccagctaatggcgggactactggtgatgggaccggtgatgattccaaccaattggtgtttattcgtcctactgttgaaactgcgaaagcagacaattctatattgtttaacgtagcggggcgttcaacttcattaccccaccatgctattaacttgtttggtgggcatttcgaaacgcataacttaaaagctaagttgctgaatcttgcatttggctataatgtcaacatgttcggtacagttttttcacaaaacggaccaactatcgattcagataataacccgataacaacggtttatcggggagtttacatcgagaactcgcagaacgtcaatatgttcggttgccggattggcacgactaacaggctggcatccgttggtgtttctgataccaagtttatcaaaatcacgggtacatcacaaaacgtgaatttggttaacacccatttgattgggccttacaatgatatatcttctgaacgtcataatattgacaatatcatagattattcagaagccaccaaagggttaaaatcgtttacagtacagggtgtcaccgccggggattataccagccgcccaataaccaaagatataagaatcagtagtatagacgggaagaaagaatattctttctatactgataactctgggattttacatttatcgtattcaacaaatatagcggattcaagtactcccacagatttaatgacgatggatacgagcggtaatatcctgaccgcagcggacttgactttaggtgcgttggcaggaactgcggctacaagaagattgtcgggtaatggcggctatatcgcctttgatacaattggtcgtgtgtatttcaacgctgtaagcaactcccaacaatgggtcatgggttcagcagcatttaacccgacgaccgataacgtattcactctgggacaatcagggtttaggatatctgccagttttgttgtaaaacgtcaatatactgcgacagtatacgattccgctggtaatggtagcccggaaggggtcgtaaccgctgggattgggtcgacttatcgtcggttagacggagcggcaggtacttgtttctatgtaaaagaatctggaaccggtaataccggttgggtggcgaaataatgaaaatgaaagttattcgggatagttctggtaaagttatcaatattggtgattgggattatatggaagagccagttgaagatccaatcactggtgaaatccatgttgtttctcataatcctattccagaagggtcaactgaaggtgaggaagaagtttcacaatctgaagacggtggtttatacgtgatgtaatatttcaactaaataccccatattggtaacgccttatggggtatttcaaatggccagaaacatagaagaaatcttcggtggggtagtcgttgcaccacaccaaatcccgttcacatacacttcaaccaacggcggggaaactttcatttctctgccgttttatcctatcacagggttcgttactatcaatggtggcgtgcaggtcccgcttgataattttgtaattgacgggaatacattgaaccttggtcgtgaattagaaccaagtgatgttgtattctgtttgttcgataaaataatgtctccacaggatgcgagcaacaatgcaatccgaatttataaattcatctcagtaggtggagaaactggatttactccagattttaccacttatggcgtccaatccctttatgtcaacgggaaataccaaattgcgggcgaagattacacatattccaaaacggatgggaaagtgtctttcacttccccattaattgctggggtatgggtcgctgctgagatgaatatcaagcaaaacatccctgctttagctggtaatgggggtgcatcagaaattggaacagcatctgggcaaaatgtacaagtagaacttgattcattccgtaatttgttcggagaatacgggtttagtatggtagggcagaccacataccaaggcctcaggaattaccatggtaattccaattatatgatggtatatggtagggcataccttttggacggagggcacggaatattcgaccaggttcccggcggggcggcgatgactatccctgatgatgattgtgtacacatccgagatacgttgggacggttgtggcgccgcagattcgaagacaatgttataagaatgagttgggcgggcgcaaaaaaccaattagaaacttcttcaccgcaagatgatgctttcagaaattgcctccttgcggcgaaatcgctgtctcctaccggttatccacaatcaattatcaaaggtttagatcgtggtgtggtttatcttgcagagcggcattatattcgttgtggtaattttcctgaatatatggcatggaagttgccccctactggcggtggtgaccgttttggactggatctgttgtgtgcattaggtgaaggcgcagggttttttatcgtccaagccaataatccattgttgcgcgtccgagtagacaacactggcattccatttaatgtttcgaattacactgatgcccaactcgtgagtatagttgagaacaattatattttacgtctggaatcaatggtaaatgccccagaatttgatgttcatccaggtaattatcccgggacagttttgtatagcacaggcaaaaaagattattcagcagttactgctcaatggcctgatttagttcaagttttaccttctatacagaacgtcggaagtgcggtgttcaacataaaaaattgcggtcgagattttatgctgacaaacaccggggctgggttagggcattttcattctgtttggtcacaaaataacagactccccggttacatatcgaactgctatgatttaacgatgacatatgaagattatgtaccgcacaatgaaacatctggtgggttgatatttagtgaatgtggtactctttcattagaaaatattttgattggtgcaggtgggataggacatttgtgtatatgggattgccgtaacgtccatatgaaccgtcatatttctatatgtggtaataccacttgggctgcatctaaccaagtagatgatctttatgctttagaaatttgtaactctgaagttcatatgagcggtgtacatgcccaaaactctggtaaatttgctcgggttgggtttaactcacaattaactgtggaccatcttactgcatgggatgtttcaaaattattcttgatgactaatgatttgactaaattgaaatatcgtggccagcgcaaggacgttacaggagatccgagtcgtatttttgtaacttcaggattcgctcaaaaccttaatgcgtctcaatttggttgggcctgcacgccagttatagaaatagacagtactgttaatggcgatttcaaattatattggaactgttggacaaacaacgttcacgcgggatatgggtctgaatctgaagcaaatcttgctatcgtcagtgtggcttctacaagttctactggtacggtatcattcggcgaggacgctaaattggaaggtaatacgacgaactatgttcttcgtctcgcgaacaaaaaccaattagggaaagttcgcactcgtcaaacttccttctgtcgtgtgcgttataccaatgacaactctcagtcgtcctttgccatgcgcgaagctgctcacgacaatggtactactgtgattcctattgatgggacgacatatagctatccgtaccgcagacctgctaaatatttcgtatctttgaacgtccctgctggaggtggttcctgttcagtgacattaaatggtatgacgattttccaaactacggtggttggcacacatggtatagttattgagatgaaataccaagaaacggtcgtatttacgtcatccaacgttactgtatcaaatgcgcagtggcgttatattttggaggaataagaatgattaaagctatcaaagggaatttctctgctgtaacttcagtaggagaaatttcataccaatacgccactgttcagactttccgtggagatattgggagtgtgactatagatgtatttctgtctgatcgctggattatccaacgggacggaatcaatgtggtagatgacactgcgcccggagttttcaaatctgtgcagtttacaccggattggcagagtaatttgaatatcatagatcaagcatatgaatatttgaaaacccttccagagttttcaaattctaccgaagttgtatagaaagataagggggtataacccccttatcttatttttctatttggacaacaattccattttctttcagaactgattccaattgatcaatgtgtgctttcagatttgaataaacagcgatcgcgattaaaacttcttcgcttaattcaacaggtgagtggagttcatttatgttaaaatttccacccgacgccaccactttaccatcttcaccaaatgtgtagacgcacgcatctggtttggttttcttaacttttattaatatttcttgtttactcatgatattatacccagctgtttgagattgaacacaaacatcatacctgaaactgttcgtctggaataatacactaaatacaagaatcaagtcacagaaaaacaacaggagattcatcatgaatccgcaatttagtcaggccggtggttccgtctctaaagacgtgaacaaacaatctatcgcacgtgtatacggcgttaaaatgagcgaagtggcttatttgaaagccgggttagtattgaatggttacaaggtgttgtttgataaaacaacccaaacttgttggtatcgcggggacgctacaggtacagtagttacttggtctgtgctgggaactcaaatgaccttagtgactagttctgggacatccatattgcaaataacttcaccatcagatgatttacgcaaagatcttaaaaatggtgtagatattacaaatataaaaaactcaaaaggcccttctatacttagatcattaacagacagatttcaagatgtatataatgttaaagactatggtgttgttggcgatggtattgttaatgacagcgtggcagcgcaaaatcttattgattatatcagttcaattggcggtggatgtttatattggccgaagggtatttataagttaaacataatcaacaaatccaatgtaagccatgtaggttgtacatttggatctgttagagggatcatatcatttggggccacaataaccaaatatgctactcaattcacaccagcagctccaggatggattgtggatacacccacgaacggtggggattgcgggggaattattggtatagatttcaaaggcggtgggttaaccataccgggaggtggtgttaacctccgtccaggttcaaatgattggattatatcttcttgtaaatgggattatttctctgatgaagctctagttacgaacggtttaataggaagattttctgatttgtcgggaacgaattgtcttcttaataggacccgtactagtaggaccggagtttttgtatttaatggcgcggataattttatagaacgtattcaaggtaatacgggaataacggctatccaatcttctaacctgtatttatgtggtatcgttataggtggggcaaataattatgctataaatcttgaaggggaactttctgaaattgggattgttgtgagtgcgacaggcgctatgcataaacttagcaactgtcgtgctgatttgaattttgggcatggattttatggttcggcgattatgagcaattgtcatgcgctaaacaattccaaaactggaactggtgggtatgttggtagtggagaatatagcgggtttgttcttgataaccgttcacaaatcagcaattgtcgagcagacgggacccacaagtacggtatagattggatctcttctgcagaccaatccgggatagatttaaaaccgagagtatcagctttccattctaccggacatacgatagcatctatatcagatggattgtttaatgggttcttacattcattgtttaatggcttccagcgcgggacaggaagtaccccaaacgtcgaaggattgtgtacatacatccctatagatacgacagcgactgatatcaccgatttattgaatggagtgaaaggccagcgtgtggttatatatggtaattccaatataactttagttcgtagttctacgttcgtagtgaaaggttgcacatcagatggcagaaaacaatgccgtcttgggggaacttacgaattttggagaggaaatggtatatggtatgaagttggagcacaaacccctgccataggacctagttcgttgagaccaacttcattttcttcgccgggggatcaatattttgatacaacattaaacaaaccgatatggaaaaattcagccaatactggttgggttgatgcgactggtgctgtagtataaacaaagccccttcgggggcttttcttttgaacaagctaaatagaaggatacactgttgtaaaccaatatgaggggaaacccatgaaaagtcagtttaatcaaccccaagggtcgactgctatagaagtaaatcgtcaaactttagcaagaatttggggatatccgattagatccacaatttatttgaacacatacatcaacgttacagggtcctctattatttttgaaccagagaccgggactatgtggtatacgggcaccgcacaaggaactccaatatcctgggtcgtaaattctaaatcgttgacacttaacacaaaccaaggtgtatttacttgttggcctgccattgctttatctcgagatattacatcagaaactcaatctatccgatctttcacagaacgagcagatgatattccttctattttagattgggattctgatagtgctaccgatgatagcaccagaataattcgtgctatagcagatggtatccgtactctctatgttccatcgaccagaacatttaatattggtgaaatcgatataacgactaatatgttaatttatggaaacggtatcagtggttatagacaagttggaggtaagtttgttgttgcggccgatgctgaatatggattcgcttttacgggttccggtaatggtggttccggtggtggtaccagggttatcggcggtggcctttctggattgagtattatcggcgcaaactcagcatgcgcagctgatatgattcgtgtcagccatgcctctagccatgaattcaggaacgtcgggttcaggttgactcagggtagtgcgtttacattagaagattttatggaaagccgaattgaggcttgctatatgaataatatcggggctgacaataaacctgtaatctatattaaagattacgtggatgctttaccttggaacgtcaataatttacatatccgtgaaaatacttttgggtcttgtagcggtaactggattcatatgtcagaccgatccaatgccgacttgatctggattcatgggaataaatttgagtgggattccactccgattagtccaaacacttcagcaaaatccgttatctatgccggtttagtcgaaaggatttctataaaagataatggatttgtgtatttctatcctgaccacaacatgtatgatacgattttagaactaggagcaaatgccaactatggggtcactttctcggataatatggcatggggttgcactaacgccaattattggaaaacggcaggcggtgctcttgcgggacacaataaccgtagcaacgcccctatggcgacggtaaacacaagttcttattctcaagatatagaagatccaataataaggaccagcacagggaacaaaccgacgtcgtatgctgctaagaagaatgacgtcgagttcatctctgttcacaaacttactggtgcaaatgatagcaataactttgtggccgatacggacgcggtgatgtacgggacttgtatgaacaccccagcatcttctgaatttcgtagggctttcatcccaaaagatatgctggcatccggtcggatgataaaagtttccctccggtgtaaaaatgtcaactcttcagatggacaacttcagttgttactgaacggaaatgctatcactgattcagtttcgggtcaatctacaggtttgaattatattacgatacctgctaattctggatggaaagaatattcatggtatttgaatgcttctcagttggcttctggtggcgcgttgatttttagaaacaatagttcggtcagatttctttttgatggagtaaggatagaatacgctcgttcggttagtattacaatcccctggtcagcaacttcgatgcctgcgaatactgtttccagtacaactttagctatggggagtagattggtgtcacatataaagggtgtcacttctgtttctgccaacggatcattgggtggtgcggtttcttcggcttatttgagggcaagtgataatactttagtggttcaattaatgactgcagcttcatccgctacggtggctgctacccgtttaacattatctttaatcctggagtaactcatgtatactatgaatgtcatctataaagggataaatgtggtagacgcaaatatttctataggtatcgttactataaatgcagaccataaatctatggtttataatgttttatttcgggcttcagatgatcaatcattagagccgttcgactctatatttctaactgcagattatgattcaagtggaccggatccgattacacaggcatatgataacttgaaaagtctagaaaaattctccactatgacagaaatcaaataagccccttcgggggctttattcttcatacgatgggttgtgtggtatactaaataatttcaagacaaaactctatagatggagtacaaaatgcaacaattgaatcttaaccgccgcccttattgggacgactggaatccagagaagcgtttcagccgcatcctgttccgcccgaatccaatcaaagtacagactcgtgagctgaaccagctgcagacaatcatgcaggaccagattgagaagattggtaatcatcttttcaaagatggctccatggtaatcccaggcggtttgactattaccaattcggctgtatccatgaagttccagctggcgggtgggagcgaattcaccgatcttgaaggaattcaagaactgtatgtgatcggcaaggataacaatgccaaggccagggtgctgtctctggagcgctacaccagcgaaccggacatgatgttctgtatcctggaaatgacagaatccggtactgccgatggattcagtcctaacgataatctgtacttcaacacttacgatgtgaatgataatttcatccgcatcggttatggcgttgctcagactgtcggcggttctattgttgctcgcatgaccaagggcgtttactttgttcgtggatttttcctcgacgtcgacgatgatatgttggtcgttaacaagtacgcaaacaacaccagccatcgcgtcgggttcaaagtcacggaagaaatcgttactgaagagcaagacagtagcctgttctctaatgcacagggtacaccaaacacgaaagcgccgggcgctcatcgcctgcgcctagatctgagtcttcaggcgttcgattatgacgcggaagttgaagacttcgttgaactggcaaagatcaaagacggtaaaatccagtccatggtcacgcagtcgacgtacaatatcatcgaagacactatggcccagcgcacttatgaacaagctggtgactataatgtgtctacccaccagatcgatcttcgtgaacacctgaaagaaaacaacaacggcggtgtctatactctggccgaaggcggtgatgaaagcaaactggttgcggtaatgaagccagggatttcttatgtccgtggtcgtcgtattgagaatgttggtgaagaactcgtcataatcgataaggcgcgtgataccgacctgttgaacaacacgccagttgctgtagcgacaggtaatttcctgacgaccaagaactctaaaggtgttccggttatcagccgcagcattcgctataaattgctgaacgcttctggtgttacccaagcgactgccctgtgtatctccgctgaccggaccgggacggaattccgtctgtatatgcgtgacctggtcgtcactggtgatatgagcacggtcaccaaagttgcttatgaagaaagcgggaccacgatgttttcagccgcgctggaaacaaaccagttctcacaaagttcatctatggacctcatatttgaactgcctgtatttggcgtgaaaactctggcaccgaccgggacgattgatatcaactacaccgtcttgcgatcttacaaaattacgctggacgcatcaggtaatggttctatctccgcgccgctgggatacagcttttctccggaattttctctgtattccggggctaaatctgatgggactgccgctcagatcgatatctccagtagcctgtctctgaccggaacaccagttgggtcggctcttcagatttccctgggttctggtaatgccctgcaatcgatcaacctgttggcgctgatggtacgcaccactgctatcatgaaaacgaaaaccgtcacgactgcgactgagactgtgaccttcaccaaccaggccagcatccagcttgcgaaccatgacggctacaaattgacttctgtcaaaaatgccaatggcgctgacgtgacctctaacttcactctggatggcgggcagcgtgatgcagcgtattacaagtccagtctgatatcggctactggagccatttcaggtgcgtatacggtggaatacacgtatttcgctcacagtactggtgacttctttacagctgattcgtatacttcgattgattacaaatcaatcccgagttatacgtcaagcacgtctggtacagtgtatggcctggctgacagtattgacttccgtcctaaaatcaccaacggggcgtctgatactgatatggtgcggccgaatacggctatcatcatggacgttgaatattatctgcctcggattgatgctgtgtacctggcagacaacggcgttttcaacgttgctcgtggtatcagttcgaacaacctggcggctccggctatcccggcaaacgccatgcgtttatacgaactgttgattcctccgtatactccggatattgacgatattcagatccgtactatcgacaaccgccgctacacgatgcgggacatcggtaagctggacacccgtatatcgaacgtcgagtactacacgacgctgtctcagctggaatcttcggctatgacccagcaagtgttcgatccggtaacaggcaacccacgctacaaaaatggtatcgccgccgacccgttcaaagacttccgtctgatcgacgatttgtcttccgactggatgggttctgtagatactgataatggtcgtctgcgcccgtttgtacaacaaaacgcgattgatctggttccagatggttggaacaaggttatggacggcatggttgtgtgtcaatacactccggaaatttctgtcaatcaggaatatgcgacgacgacgatcaacgtcaacccgtatgctgtgttcaactggacgggtttcctcaaactcaatccgacgacagattactggtttgaaaactactatgttgcgcctcgtgttatcaacgagacgatcaatacccgtggtgccgttcaagaaggtacggtttacggtacatggcggacagtttctgtttctgagcgggtatgggaaccgcatggcgcgggcggcgtttggtggggttatcgttatcggaccactgtgtctacgcgcgacgtttcgacttacacatacacggatactaccaccacttcactttctggtgaacagattgttgagacgcaggttattccgtacatgcgttcgatcgaaatcaactttgacgccagcggcttgcgtccgtttactcggatgtatgccttcttctccggtcgggacgtgaacctgtattgcaaaccgaacggcggggcatacggcgcagcgctgacaacagatgccaacggtaatttgaaaggtgtgttcaaagttccacagaataacaccattaagttcaatactggcgacaacgtcttccgtcttactgatagtccagtggatagtaagtctgctgatgatactttgacgaatgccgagattgttcataaatcattcggtaagaaacaaggtatccagaagacttatgttaacactcgtgttctgggttacactgtatcaactaaatctgaaacgacttcgtctgaagccgttgttggtcagtggcgagatcctatcgcacagtcattcatggtcgcaaccagcattggtggtgaatatgttgaaggcgtggaagtgttcttctcaaccaagtctcgagatgtgccagtaactctggaaatccgtgagatgagcaatggcctcccagcgagcacggtcatcacccggaaaactttgaatccatctgacgtcaaagtatcgaacgattcatccctcgggacgaaattcactttcgattatccggtgtatctgcaggcaggcacagagtttgctatcgtcctgctggcaaacacccaggattacaatgcttacatcgcagagatgggcaaaaagaacttgctgtcgaatgaatatatcgccaaacagccttatactggtgtattcttcacttcttcaaacggttcaacctggtctccaaaccaaatggcggatatgaaattccgtgtgtatcgttgtaattttgctgccgctgataacgtggtgacatttaccccgaacgccgggcctaaaattcgtcctctgggtctgaacgtcctgaactgcgtcaatggttctactgttgtgactgtttacgctcctggccatggtctggttgcgggtaactccgtgacgttgtcagaactgacaggcggctgcggctttacagcagagcaactgaataaagtccataccgtcacggatgcgagctatacttcattcaagattgacgttggagcagctgcggacagcgatggccagattggtggtgaagatggttctttcctgggcaattacctggtggatatgttctatgccagcgtaacgaactctgccctggaaggttctatattgaaactggaataccgttatcgtgattctacgtccaattctatgtctgattgggctgagtttgaatctgatactgatgttcctctgccgacagaagggatttatcgtcaggccggggacttccaggtaagagccaccatgactcgcagcgcgagcaatgcgtacacggcaccaatgattgatggtgatgacttaaccgtggttctcaactcgcatggcgtagatcctttcgaggacgttttccgctatgtgaccaaggacgtaagttttgacaacccgtgtacaactttgaaaatgtacttcggtgcaatgttgccttctcagtcaaccatgactgtacaggtcaaacttctgcgcccagggcaagaaatggattcgatcgaatgggaaacggttacaccgaattctcctctggtcaacgatggttccgcattctttgaatacgaatacgataagaccgtcgacagcagtaacccattctctgccttgaaagttcgagcattgattcgcggaagccggatagccccaccttcctgcaaagatttccgcttgatcgctctggcataaataaaattgaaatggcgggggattccccgccctattgaagaggatatgtgtatgcgtggaatgaaagtacaggggcacgcatcaatggtacgcagtagctcttgccccggagcaattatctgcacggatcatgtggctggtatggctgcacttcgatcccggcaaatcaatgagcagcgggaagccgttattgcacaacaggcctctcagatcgatcaattagaagcgaccgtgaagttgatggcggaaaaactcgggattacaatcccggacgggggcgaaaatgacaacgcagaataacagcgtgtttaatgttaaggaaatcttgactgccgccgtcgcatctctgttagtctcttctgcgacattcgtatggtttatgggtgggttagagaaccgtgtgaatgtcctggaaaaagactctgggaaagttgaccagattttggtcaaggttaatgatctcagtgaaaaaatggctgtcatgaataacgatatatcctacgttaaacaaaacatgactgaattgaaattaaacagtaacagcctttctgaagacgttagaacattgcgcctgactgtttcaggtatacagcgcaaggagggtgataatggccgtcaataagattcgggacaaagattcatttatgaattatgtccttcgcaaattgggtgcgcctgtcatccagatcaacctcgacaaaacacaagttgaagacgcggttgatgatgctttacagaagttttgggagtatcatcgcgacggtagccaagatgcattcttcctttaccaggtgaagcaggaagacatcgataaaggatatatcacctttccagaagatatcgatgacgttgtcgaagttatccaagggccaccaattgaatctatcggtaactgggcaaccccccagtggcagatggctcaggcgatgttagtgcccaaagctgctttggtatctatccgtcttatcgattatgtctctatgcagcagcgcctttccgatatcaccagcgtcctcaatgtccgcagggcattcgtctacaagaaattccagcgccgtttgtatcctcaattctcagctgttatcgatgaagtcctggcattcaaatgctatcagaacatcgatccaacggcggaagagaacacagaagcgtggaatgatatgtggctgaaggcttatgcgactgcattggtaaaacgccgttgggcggaagtgctcaaaaaggcccgaggtatccgtctccctggcggtatcgaactggatggtgatagtatgttcagcgaggccgaggccgagatagagcgcctggaggaagaactgcgtactggtcagcagtaccccatcgacttctttatgggataacaaaaagccgggggttcccggctttcttttagagtttaatatcccgagggccggggaaagtagtcgcctgaatatatccgtcgtgggtgttagtactgtcccaccattcaatgaaatcattcccgtcagattgttttaccaaaccgacgatatcataatcaccacctgagattttagcgtccacacagatgattcgcactcggctaccatcacgagtttctttgatatcttctacttgcattcatcaattcctcaatagaattaaacatcgactaaataccttcaaaattgagggtatagccatggccacttctcgttatttcaattacactaaccaccaaggaactcagaaattaattgatgacctcgtggtggaaatgatacaattgcgtgggatagacgtcaagtatattccacgcgccatctatgaaaaatacccgattttaaacgaagccgaacatcgtttcgaccaggcgtttgatattgaggtctatatgcaggattaccagggcttcaacacccaaatgtgggagaagttcggtggtattcaattgcaagatgaggtgacgttcactatcgcccgccgccgctttgcggaagtcattggtaacgggccaggactggaccaacaacctcaggaaggggatctcatttatcttccgatggcgaacaaaatattcaaggtcaacaaccctaacaacgacgaagacttcatgcaattcggtaaatggtacacgtattcattaccatgcaccttgttccagtatggcaacgaagacttcgacactggcgtccctgaaattgatgatattgataaacgtcttcaagatcttgaaggtgatggggtttatcaggatgctactcttcagactgacaatcagtttgctgatgaaattgaacaagatctggctcccaacaatgtcaaaatcgactttggagaataaccatgagaccttttgaaaattatttttaccatagttcactcctgaaatatatccatgtgttcaatgccattatgtccgatgttcaggtcaaaactgagcgcgggcttatgaaagttccgttacacatggctattggtcgtcgtaatgacctgaaccgaaataccccggcgaatgccttaccatttgcgactatgtctttcggtcaatttgaaatcaataaacaggtaacgaattcgtatcacaacaaattggcgactaataccgcaacatctaagcaacggattccgatcatcatcgactttgaatacaatgtccgtacgaagaagatgaatgagatgctgcagattctggaacagatttattctgtttacacaccttcaatagattgccagataaaggacaacgaaacgctcaagcaggatcaggttgtgaagatccaattggtgagccacacgatgtcagataactgggaaggtgacgcagctgaatctcctcatgtcgattgtaatttcatgtttcaacttcatggtgcgatctatggctgggattattgggtcgatgacggctccggtgctggtgatccgaacgttatcaaggaaataattatagaaatgtctactgatttgaatacgccgtggacggaattgcctctttggtttactgttgacaaagatggcgtccaccatccagaggataattgattatgtctaatatgtcggaacgtttgctgcagaccttagacgctgtctcagcacgagatgaggttgcccaagatgcgatgaagaaaaccgcattaaagcctggtgttgattatgacgaagaaaccggcgaatggttaggtgatcccccggaaggttatcagggctttgagatgcctccgtcattgtcggaggtagcatcaaaagaatcgaaagtccctgattatgaggatactgatgccacaactgactacaaacgcatccgtgacaccacatatgccatgcaggaagccacgatgttcatgatgggtaaggccgctgaactcgcagcttccacagaggctcctcgtgcattcagtgtcttccgtgagctgggtgaactcatgcgtggcctcaacaaagacctcatggaaaaccagaagactatcaaggacgttactcgcgacagagagccgccggggcagaccaccgttgaagtcactgaaggtgaggatggttccaccacagtcaaggttgggaagactgccagatcatccagagatctccttcagatgattgagaaagtacggcgcgacgctgaggctaatcgaaattcccgtgttaatcctgacgaagaagtaatcgacgttgcggaagaaccaaaaccggaagagaagtcagagggtgaggacaatggcgaatccgaagcgtgaagtcgaatatgccccggtcaagacggggtttaaaattgaagacgtcaaattgcgtatggaccaaacgttcatgcgcaaaccgactgtgcgtgctcctcgcgttgaattagtccttactgatgagcaggaagatgaatatgtcaagtgcgctatggacgcccactacttcgctgcgaactattacaagatcaccacaatcgaccatggcttcatcttgtttgatatgcacgattatcagaagcaattgttccatgattttcaggatcaccgcttcaatgctgttgtgcaggctcgtcagtcaggcaaatgtgtccggggtgattctaaagtccatgtgtacgataccctcagccaggaagagttctctatcaccatagaggagcttcacagccgcttcgaggacgttaaccatgcagagccgttgaataccattggcaaacacaacaagttcgtagacagccgtttcggcaaacgatactttgtgcagtccgatagtggttgggttccggtaattgctgcgcacaagacaaaagaatacgccgagtatgtggtcaagactgaaagtggccggacgattcatgtcgcggacgaacatctattcttcaatgaatataatcgtgaggtgttcgccaaagatctggaagccggggatgccatcatgacgcaagatggccttgaatgtatttctgaaatttgggaaaccggtgaatcccatcacatgtttgacctccaggtgaaatcatctgagcagcgttattacaccaatgggttcctgagtcataatacgactgtggtggcggcattccttctctggtatgcgatgttcaactctgataaagagattgcagtactggcgaacaaagagaaacaggctattgaaatcctggaccgtattcgtaaagcgtatcaggacatgccattcttcgttcagcaaggttgtgagaagttcggttcgactctgattgaattcgagaacggttcgaagatcttcgcatacgcgacttcttcggactccatccgtggtcgttctgtatctctcctgtatgtggacgaagtcgcgttcattgaaaacgactttgaattttgggaatcgactttcccggcgatcgcccaggcagagacttctaagtgtatcctcaccagtactcccaaaggtcagcgcgggctgttttacgacatcgtcacgaaggcgaacccagaacatcctcaatacaacgacttcaaactcacagaagttccttggtacagggttccggcgtacaccaaagacccgaattgggaatccaaacaacgcgccaaacttggtgatgcccgtttcgatcaggaattcggtatcaagttccgtggttctgtcggttcattaataccgtcgaaatgtctggacaagatgacatccaagctgtatcaggagccgaacgagttcaccaagatctacaaaccctttgacaaaaccagaacatatttcgggattgcggacacaggcaaaggggttgagggggactactctgtgctgaccatattggacatcacggaatatccgcatacgattgcagccaaataccggaacaacacgataccaccgatgatgtatgcatacacgattgctgatatgtgtactcaatacggtgaatgccctgtgcttgtagagactaacaatgatgttggtggccaggtgattacaatcctgtatcaagaaattgaatatccggaaatcgtgttcacatcaacagacaataagggaactggtaagaaaatcggcgggcgtcgtcctgaaccggggatcaacaccaacaagaaagttcgctctatcggttgtgctaacctgaaagcacttatcgaaagagagatgttggtaatcgaagaccaagatacgattgatgaactcagtacgttcgtgtttactggaacccgctatgaggccgatcagggttgtcacgacgactgcgttatgccacttgttctctattcatgggctgtaaaacaggaatggttcagtgacctgactgataccagcatttcgcaagatatgcgcggacgtatgaatgcgatggagcaacaccaagtccttccatttgggggcaaatttactggtgatactcctcatgaagtccagcatatgccgggcttcgggggtgtgaatgtatttgatgaacgttctgggatgttaatggaagagtggttcaagaactgatcactaaatatctttcaaattgagcgaaactctacagagaaggaataagattatggcaactacaagcttcagcgttgcgccgtccgtacagtggactgagcgcgatgccacgcttcagacgtctccgtccgttgttgttcagggcgcgtctgctggtaaattccaatggggcgaagttgaattgcctgtattggttactagcggtgagactggtctggtgaagaaattcttcaaaccgaatgatgataccgcaatcgactttctggtcattgctgactttatgtcgtacagttctgctgcatgggtgacccgtatcgtcggccctactgcaaagaacgccgtgactaaaggtcagagcgcaatcctcatcaaaaacaaattggattttgagaccgcaagtccgtcggcttctatcacctggactggtcgttatcccggttctctgggtaacgatatcgccgttaacatctgtgatgctgcgtcattcccgacctgggaattccgtaacaacttcgcatatgctcctcaggctggcgaattccacgttgtcgttgtggacaaagttggtcgtatcaccgattcttccggcgctgtcggccaggtcgatcgcatctctatttctggtactgctaccgccgctggcgccattacagtagcaggtgaatctgttgcatatctgcagacggatactccagcaactctggcggctaaaatcggcctggagatggaagcgctgactgatgtttattcgagcgttgttgtaaaatcgaataccgtcattctgacccacaaagctatcggcccgcagcccgtgactgccgtggttcctgatgctaatggcctgactggtactgcgatcatcaccactgttggcgcatccggcacgatcatcgagaaatatgaactgttgcagaacacccagggttctaaaaaatccgacggtgcgaacgcatatttcaaagatgttatcaacaacacttcgaattgggtttatactttcactaatgccctggctgctggtgtggttgaactcgaaggcggtgttgatgactacaatgtcaaccgtgtcgctgctatcgaagccctgaacaacgccgaagcatacgatgcgaaacctgtgtttgcatattgcgaagagctgattgaacagcaggcgatcatcgatctgtccactaaccgtaaagacacagtgtcgtttgtgtcaccgctgcgtgatgtggttgtcggcaaccgtgggcgtgaaatggatgatgtcgttgcctggcgtgaaagcctggtgcgcgattcttcctatttcttcatggatgacaactgggcatacgtgtacgacaagtacaacgacaaaatgcgctggatcccggtgtgtggcggtactgcaggtctgtgggcgcgtactattgagattgctggtatctataagtccccggcgttccataaccgtggcaaatacaacaactacaatcgtatggcgtggtctgcgtcttctgatgaacgtgctgtgctgtatcgcaatcagatcaacagtatcgtcaccttctctaccgaaggcatcgtcctgtacggtgataagactggcctgacccgaccgtctgcattcgaccgcattaacgttcgtggcctgtttatcatggccgaacagaacattgctgccatcgccaaatactatcttggtgaaaacaacgatgcgttcacccgcagcctgttcagcaacgcggttcgtccgtatatccgtcagctggccaacatgggcgcgatctatgacggtaaggtcaagtgcgacgaagacaacaacccggcagaagttatcgcggcaaaccagatggttgctggtatctggttgaaaccggaatacagcattaattggatctacttggattttgctgccgttcgtccggacatggaattctcggaaatcgaatccgggggcggcatcgtcgcggcgtcctaataaatataagacacatgccctcttcggagggcatttcaatgatctttatgatagagaacatcgaaatgatcggaagtgtctacaaaatcacaaatctcgccaaccagaaagcctatatcgggatcaccacgcgcgacccaatagacaggtggtgggagcattgcaacagcgctcagaatggttctgattattttattcaccaagcaatccgcaaacacggcgaagaatcgttctcagttcaggtaatcgcgcagaccaattccatagaagacctcaaagaattagagatcatattgataaagcaacatggcacccatatgtccacacagaaaggttacaacaagacttggggcggtgacggcgcaacgtcttcagggaaagcgggggcaatagacgttaatactggtgaacgtttaggattaatagattgttcagaccctcgttgggatacgggagagattattagttgcagacatggagtcaaacataaagataatacccggttgtccaactatgccaaaactcggactggtattaagaaccccaatgccaaaagattcaaactgatttctccatccggcgaagaacatgagatacacggcaactgtaaagaatacgtggaacgccttgggttgaaatattcagctctttatgattatattgagaaagacatccctgttccaccaccttctgtattccatcagaagaatgcttcacaagaacgattgaacactgttgggtggagactcgaaagaatatgatatttgcatacaaaattgaaatgatatccaacaacaaggtctacatcggtgtgaccaatgacccgcaaaggcgatatgaacaacatttagccaatgcatttcaatataatgttgaaagtgaattgtatgatgccatgcgcaaatatgggccttccgcttttactttcatggttattgctcaaaccgatgaagtccacaaatgggaattagaaaagcaattaattgctcaatatgattcttatgaattgggctacaacatgaataaaggcggtaacgatggaagtcatctggttggtaaagctgctgctaaattgacctccactggagaacatattggtatggtctcattaattgatccacgttgggatctctgtgagattgaaccagtacggaacaatgttgatcatggctttgatctcagtaaattgacgatcaaaagattaacagactaattagaattgtgtaactctttttggagaatgtataatggctacagtaaatgaatttcgcgcggccatgtcacgtgggggcggcgttcaacgtcagcaccgctggcgtgtgactgtaaacttcccggcattcgtagcgggttctgacaccattcgtgacgtatctctgttggctgtaacaaccaacaccccgacaggtcagctgggtgagattctcgttccgtggggtggccgtgaactgccgttccctggcgaccgtcgttttgaggctctgcctgtaacgtttatcaacgttgtagacaacgccccgtacaacgcatttgaaatctggcagcagtatatcaacggcagcaacaacaaccgtgcgtctgctaacccagatgattatttccgtgacatcatcatggaactgctggatgctaacgacaacgtcaccaagacctggacgctgcagggcggctggcctcagaacctcggtcagctggaactggatatgtctgctatggactcctatactcagttcactgttgacctgcgttacttccaggccatttcggacaagtctctctaacgttacacgtggtgggggaatttatttccccaccactaattacaagaaaacgttgaggacatataatcatggcatacggcaaaggtttctttggtctgttcagcggcggcggtttagttgacgccaaagttgacacggacaaatatgtccagagtcaagaagagaagctgctttcaaaagcgactgttgtagctctggacgacgctcaggatggttcagtcatcctccagggcggcgccaacacttacaactatgttggtgttgagagcgagctgcttaacgtcaaacagcttgttgaagaatatcagtccatggcccagcagcctgagatccgcaaagcggtggacatcattatcaacgacgttgtcacctgcgaagaagatgagacgcccgttactatcaatcttgataaagttgaaggcatcagtgaagatttgaaagaacaaatcactgaatgcttcaaagagatcatgaatttgctggactttgacgacactgcgtatcagaagatgcgcaaatggtatgttgaaggccgtcaagcatatcatgttgtaactgaccctaccaagccaggtaacggcattcagaagctggttatgcttgattctcgttgcatccgcccagtatacgtcgttgagaaaacgatgagagaaggcggtatcgaggcaatcgagaaggtcactctcaagtattactacaacccgaactacaaccgcaaccaattcactggtcaatccggtacgtcgcagaacttccagccctctcaacaggaactggtatttgacgaagaaagtatcgtctatgttgacagcggcgaagatcctttggctaatggtgttgttcctggcctgctgaaccctgcgattcgtcctctgaacaacctggttacagttgaggatgcgacagtaatttacgccatcactcgtgctccggaaaaacgtgcattctatctggacgtcggtactctcggtaagaaatctgccgaagaatacatgactatgatgatgggtaaattcaaaaaccgtctggcgtttgaccgcagtactggtaagatcacaggtaacagccatttaatggggattgctgaggactactggttgcctcgtcgtgaaggtcagaatgccactgagattgcgacagtcgggggtggtgaccaattaggacagatggatcacgtgaattacttccttgaaaaactgtatagctctctgtttattccaaagagtcgtatccaggaagaaggaagtatcaatatcggcggttctaatttggcggagattacccaggaagaactgcgtttcaacaaattctgcgcgggcctgcgtcgtcgttattctaaattcttctctgaattccttcgtcgccagcttgtattgaaaaagattactgatgaacaagattgggttgaaaagattcaaccgttcattacatttgaattcacctcagacagttttattcgtgaacagcaagaaaatgaaatgcttgctggtcgcctgagtgccctgactggggttgagccttatatcggaacattcttctcaattgattacgctatgcggaacattatgcgtatgtctgatgaagaaattaaggctcagcaagagaagatcaaagaagaaaaagataaaggtatgtatccgaaggttcaggctgatgaaagcggtggatttagcggacaagatgttagcccgctgaaatggcgccctgaagtcgttcctttccagggtacacccggtggggaagaagagtaaaaatttatcaactaaatatagaaaattaacttcggagatacaatcatgagcgcgatcgatattgttcgagccgtactggatggtgacatcgaaaatgccacggcagaatgtggtatggaacttgacgcccgccgtgaagaactgatcgcccaaggtacagaatacgttctgaattccctgggtgacgacctcagcactggcgcggaataggtgattattatggaaatcaaagaaattgctacgttcgctgatttcctggcttcccgcatggacgaacagaaagtcatcgataaagtgaacgcaaaaggtaaacgccgtcgtcgtttaaaatgcgctcccggattcaaactttccgctgatggttctcgttgtgaagtcatgaacgccagcgagcgccgtacccgtaaactgggcaaccggaaagccatacgcgccaaaaaacgtatgggtctggggtatgaacgcaaagtcgagcggcgtaaaaagaaagccatgaagttccgtaaaatgatgggactgagtaagtaaggagcaaatgatgaaactgttgcgtgagatcacggcgataggaaaggaacttcagatcggggaagcgcaaacttccactggtgggaaggccatgttcatcgaaggtccgttcgtgatgtgtaaccaggttaatcgcaacgggcgcaactacgaccttgaaaaagtcggacgccctgctgtggaagcatatgaccgggaatacattcaagatcgtcgcgcaatcggtgaactcaagcatcctgactatccattccctgatatcgaacatgctgccctcaaaaccgagtcactcgtgtggcaaggcaacaatgcaatcggtcgggcgcgtattttaaacacccccaaaggtcagatcatccgtgctctggctgatgcggatttcaacctggctgtctctacacgtggcctgggtgagacagtagaagttaatggctatgacgatgtcaagccgggcttcatgcttaccgctgttgatgctgtcgaccgtccttctggacaagtttgttatgtaaaagcggttcacgaatctgtagactggcaacttgatgaatcttctggtatctggatgcctcgagacatcaaaggtcaggttgtagacaatctggttaaacacaatagccagcttgaagacgacttcctgcgccgtcttgatttagctcttaagaaattgggttgatttcagctcactaaatactgaaaaatcgttcagaaggaaattatcatgaaacctgaattacaaaaactgtttgagggcgttaatggcctcagcaccgagttcctggacaaagtgagcggtctgatggaggctaaagtcggcgaagcccgccttcaggctatccaagagaccgagcaggttgcccaccaggaacgcctgaaactggtagaagcgcatcagcaggaaattgccaacctgaaagaaacccatattcaggaagtggcgaccaaagttgacgcatttctcaacgccgtggttgaagaatgggcgaacaaaaatgctccggctattgacgccaccatcaaaaccgaagcggctgaaaaattcctgtctggtatggtcaacgtgctgaaagaagccaatgttgaatttactgttgacaccgacggacagatcgctgccctgacccatcggctggcggaagcagaaaaacgtgcaaacgtttctgaatccgagctgaaacagatccgtgaacaagaaagtatccgccagcgcaataacgtcattgacgaaatttgcgaaggcatggtcagtaccaaaaaagaagtcgttgttggccttctggaaggtattcaattttctgacgcctcttccttcggcgctcgcgttcgcaccttccgcaacctggtagaaggtaacaaagacgactttactgacaaagtcggtaaagacaacgaaggcggtaaatcttctgatgatcaggaaaaagacatcaaagaaggtaaaaaacagaaaaaagaaggcgacgacgaagacgatgacgacaacgacgacgatcctgatgaaaccgacaaagaactgaaagagtcggtcagccgtcagctggaagaataccgtcgtatgcgtggtctgaaaggctaaattttgcagccacagccctctataaaagggggcttgattttgaacgactaagtaatttcaacttaactgaatatcaatgtaaggaatgagcatcatggctaagaaacttgttactgaacaaatgcgcgaaacgtggctgccggttctgaatgaagaatccaaatctattcagccgctgtctgccgaaaacgtcgcggttcgcctgctgcagaaccaggccgaatggaacgccaaaaacctgggcgaatccgaagcgccgggttctctgaacaccactgtcggtaaatggcaaccggttctgatcgatatggcaaaacgtctggcgccgatcaacatcgcgatggacttcttcggcgttcagccgctgtctggtccggacggtcagatcttcgcactgcgtgctcgccagggcgttgctgacggttctaacacccagcagtcccgtaaagaactgttcatgcaggaagccgattccggttattctggtgacggtactgtacaggctggcgacccgtctggcttcacccaggctgagatcgaaggttccggcgctggcaccaccaccatcggtaaaggtatgccgtcgaccgacgctgaactgctgggctctccgtccaatccgtgggcgcgtgttggtatcaccgttcaaaaagcgaccgttactgcgaaatctcgcggcctgtacgctgattacagtcacgaactgcgccaggacatgatggcgattcacggcgaagacgtggacaacattctgtccgacgtgatggtaactgaaattcaggcggaaatgaaccgcgaattcatccgcaccatgaacttcagcgcagtacgtttcaaaaaattcggcaccaacggtatcgtagatatcgctcaggatatctccggtcgttgggcgctggaaaaatggaaattcctgaccttcatcctggaagttgaagcgaacggtatcggcgttgacacccgtcgtggtaaaggcaaccgtgtcctgtgttccccgaacgtagcatccgcgctggcaatgtccggcatgctggattacgctccggttctgcaggaaaacaccaagctggcggttgacccgactggtcagacctttgcgggcgttctgtccaacggtatgcgcgtctatatcgacccgtatgcagtagcagaatatatcaccctggcgtacaaaggcgcaactgcgctggatgctggtatcttcttcgcaccttacgtgccgctggaaatgtaccgcacccagggcgaaagcaccttcgcaccgcgtatggcgttcaaaacccgttacggtatctgcgcgaacccgttcgtacagatcccggctacccaagacccgcaagtatacgttacctccgacggcatcgcccaggacagtaacccgtacttcaggaagggcttaatcaagtcgcttttctaatagaaacaacgacttacaaaccccgcttcggcggggtttttatttcagaagtatggggttataatgtcctgaaagggggaattatgagccaaccatacgtttacaaaatagaatcaaaagatggacacatctattatggatgtcgtcacgcaaagaactgtcaccccaaagaactttgggtaaaatatttcacgtcctcgaaagtcgtccaatcccttatatcacaacatggaccagattacttcacccatgaagtaataatgctatgtcgggatggagaggaagctctccaagttgaagcacaattgatcgaatccattcacaccaaccctctttgtttaaatcgtttccatgttaagaaagatggttccctcgtttattttggaaggactgggccactcagcgaggaagcaaaggcgcatttgtctaatgtaaacagagggaagaacaaaccaattggattttcggaaacatcacggcaagcccagatcaaatggcagaatgaaatcaggatatggaagcgtccaagggcaactaaatgccaacacgtttgggctatggctgaccaattctatcaattatggaagaatgaaggttgggggcatgaacgattttgtaaccggatgaacgacgggaataatattcgagtattctacaacatgtataaaatgttcaaatacgaaaattgggttcctatggaagaccctgaatgggtaaaagatttcatgtagtttttctttatacaccctcagtgctattatattatggtctatcactgaggaaacaaaacatgaacacaaccaacattcaattaactctgtcttccctgatcccggcgttcggcagcaatctggaacaaatcaatttcatccgtaatcgcctggaagatgtggcggtccaattggggtatgtcgaaccccctcgggaagtaaaagaagcggaggatgctgcggcaccctctaacctcatcgatgtgtatgatgaaatcgggcgtaaaacgaacgctaccatacagcaaatctttgaatatattgggttcatagaaaatgcattgggccagtcttatcatccccaatcagaatctgggaaggaaatctctcccagcaacggttatcggtccatctaatggtattctgtaaaagcgggcgcggttgcgcccttttatttgggggtttgtatgtattcaaatatctcaaattctgaagcgatgtctttggctaaacgataccactgcttcaagtcccgcgccgggcattcctgggataaaaaggcttggatcaagcaattacagttacaagtaaagatgatggaatctctttcctctcagtgcggaaataacccattcgccgcccgttgccttgaacaggagtatgcaactcttaaaatacaactgaacactgcgatgtcacacgtattgcattcttaacttttcaataaccagatttcaattattattgccccacaaacctaacgaggaacaactgatggcccgtgaagacaactctcaaatttacaccaacgcgaactccacatttgcggagtggcacaacacccttgagcgcgtagcacgttctcagggcggttcagcagctgatgccgatgcctggcgtgaagactatgacaacggcaagacgccgcgtcaggcatgggaagacgaatggggatgggaagatgcagacactaattcgtaaggtctttctggacaaaaagggtatggaatcaaaggtggaagtcttcaggactcaaaaattgtttgagcaggctgaaactcggtactatctgaaaccaaccctttaccttccagaaagcagtctgaaccgcgatattacccaaatggatggtactgtcatccgttgggaaatagccaaacaggaagatgtcgaacacgacataacactttgaagcgagatctatatcatggcaaataaattcatttttctggacgttcggggcaaacgattcttcaaaactgatctggacgaaaagacagaagggttccagggtcgattgtcatatttgttgtccacgggtgatatcgacgtccagcggcatgtggcggatgtgcgggatcttctggattctggttgggttgaaattcctaacccccaggtgttgaccgtcaacctgtattacatgaaagacagcgggaagtattattccactggtgaactccatcttccccgttcagaagtcgatgccgaccctgccaagagttggtacaatgctagagaaaccgtccggaatatggttgacagcggcaatttacccggcctggtatctggtgctcgctatgacgtgttcatgtcttgtgaagagcatccgtgctatgtccccactttggtgaaggtgaaataatgaaaactctcgatcaaattttagaaggtcataaatcaggaactttgtcggcggccttagacggtcgtgacctgacccgtctggcgcagtttttgacagttgagcaaatcgaaggtttggggttgtccttcaacaatcctgaaaaacgtgaatcccatgttccggttgaattcaccaaagaaaatatcttgaaacaactggaaaaggacgttgcgtttggctttgaaaaagcgctcaaccgccgtgggatcagttctagccttatgtacgaagtcgtacaaatgtggaactgtatccttgaagaaggtctggaaaattttgattcctacgctatgtatggccttcctctctttaaagcgacagctctcaaatatgggtttgaaaacccaatcggcgatgatactggtgctgaagaccattacgaagagcagggatattaacatgcgcatcaaaaagatcggtgccagcccgttgactggtactatcttctccggcactctggaaacgaaaaccagtatgtgggtaggggataaaattgatgtcactgacgattgtgtggcagctaccgctgagcacatgcgtcacatcaagaaagactactgctacaagacacctgatggcaagtatctggtgttatctgctgaagttcacgatacccttccggaccgcttcaaataattttaaaataattcaataaacggggtttacttcttcaataaaccccgtatacttcatttcataagcagtacgacaccaactctgaaatgaaggaactacattatggcacgtacaatccacgattttaaagactccgatatcctgacctacggcatgaacggtcgcctggtagttctgaacgacggtgacagcgaagaacgctataacaccactctggttttcgaaaacaaagtgatttactccaacacccgcgaaggcatgaagcgtgccctgaccaacccgaattcggggctgacccgtttactgcctaagcagtgccatgcagttgctcgcgcactggctggccgcttctaacctaaatccgaagcccctccgggggcttactttgaaacgaaggaactatatcatgatcactcccaatatcactgtctatgctttcgacgagttctccaattttgattctttcgtcaacaaatttggtgtgggcaacgtcgaagccaaaaagttatatggttctgatcgtctgagcaagtccactcagattaatgctacgttggatgaattggtggatgccctgggagagtccttccgtgctaaaatctataagaaagacggtggtttgcgcaaactgaaagacaagactgttattcacgaggctgatcagtttaccgtgtctatgtatttcacgttcaagcttgaatatgaacttttttccaacggcgaaggttccacccattatgtcatagccaaaggcagcaatcgtccagtattcgaatcgggcgacatcgtcgctgcaatggaagaaatggaacgcctgaacaaagcatagttatcaaattaatgacattagggtatgattcatattgtaccctacacactgatgaggtctctttatcatggcttgtatgtcttctatttctaaaatgcctccgctcaaatggagtgggaacgagcacagcatttattcccgcatcatttctgcagtaaaggaaggacgcgaaagcatagaatttttccgtccggctgcttcttccaaagcgcatcgtgacacatacaccatcctgaacaatcttcgaagtctgggagtcgttgtagagcctatgccctgcagcaacccaatggtcaatctctttgtcctgagcaactttgagtattggaaatgaagactattattctcataaccggatcgcgttctatcacagagcgcgacaaaatctttgacaaattggatgaactttctcatattcattcagtttgtaatctgtatcatccgtgcgatatcctattgatcgcgggagaggctgtcggtgtcgatacgatatgcaaagattgggctgaatccagaggggcgacttaccttggaatgcctatccccgatgaatacttcgctacatatgggaaaggggccgggaacaaacgcaaccaggacatgttagacaaggcgttggagttatcacagaaatacaaggcggagatactgcctctggctttctgggacggttcatcgactggtacacaggatatgatcaaacgaatcaacaaagcagggttgtattgtaaggtcatgctcttgggtaagccaaaaaccaaacgccttctgtaatttgttaacactggagacgtcccatgatcatttttcaactgttttgctatttgttcactctgtactttctcgttgctgtcggttatgaaaccttccgtgatctggcatcgagccagtattcatccaaactggtttatgctaagaaatttgctgtccgcttctggagcaattttctgtatcgcctcccctgatttaaatacccccatcaattgggggtattttcttatgaacgcacaaatttatgacgcccttgaacaaggcaatgcatttaacaatcctctcccgggattctctgctacttctcagacgttaatcaccagtggccaacaaagtatagcaggtattacaagcatcccggatacgtccgttcaggcggcgataaccgctggtggtttgactcctgctaaactcaatacaatgaacaccatgtacgggactgccaacaccgggatcgggactctgaattcttatggtgaccagaccgttaatgaggcatacaataggatcggaacttcagtatcctataaatccggcctcaaaagtattgaacgagaacccaccaactgcgatttgattaacaacgcattcggtgtcgtacagacactcggtcgtcaatggttgactgcaatggaggatgccttatctccaataacagacaaaatccaagaactgtatgatctggccaaacaaggcgcggcggcggggttggccaaaatacaggcattagcctcacaggtcaacggattaatcaatgatgctgtagcaaaggtgaatggtgttattcagaacatcactgatgggatagctgctgagttagctcatattgaagacatggtgaagaagtgtcttaatttctcctttgctaatgttcttggcgaatgggcaaaagatctttgcgcaggcggtgtcatcaacaatatcggttctaatgatctgaaaaatgccctgaaatgatcagggcacagtccttgctggcagaactcccactggctcaataccttccaccaggagggagttcacacccacatcgctcaacctaatccatatcttcccaccaggcttaatttcaaaaacgttcatttcatttccaaccgcctcattattcacaaatacgccttgtgttgcgatcctgataggtttcttcgtgttgtttgtgatttgaaatgtaacagttatatccgtggtcagattaactccctgtttcatggtgtagcgttttattttgtcgtagaaagatgggttgaatgtgatgatgatactgttgttctgtgagtaataaatacttgctgacaagtaaggaattttgccttcttcccctttgcgtaaaagagggatggtggttttccagtatggtcgcaaagtgtctttattgtcatcaaaacaaccgacaggctggagattttgaaaactttgaaacaaaatggtggcctcatccagcatggatttttcacatttgttactgtctgttgaaatggttactggtacaacacggacatcagtatcccagaggtcactaacggaaatgatgggcgtgacgaaaatacggcaacttgtcaatacaagtaccataaaaatcatcacaatccatcttctgattccgcgcatcagggacacaattaatctccacagcaaaggtgctaacaatgtctacttcagtccaattcaaacatgacaacccaaattatgcagcatccgataagtggcgcttaactatcggtgatctgatattgttatcccgctctgtacacgattttagcataccaggcgtgtattccgagggcatcgatgggccttcgcccggttcagtgctcaacacgatcccttctgaacgtttaacatatgatcccatcgtatttacgttcgttatcgatgaggattgggtaaactgggaaaccatctacaactggatagccagtaacgccgccgctgatatggctgttagtaaagacatcaccatagaattactcaacaacatgaaccgcccggttggcctgcaacttctgttagaagaagcacgtccaactgcattggacaacgttcttgttgatgtggacgcttctgttccccaattagttacaacggtgactttcaagtatctgaaactgacaccgacccgtgttgtccgcgaaattgataaagaatgagttataatagagagagttgaaaaggtgggaatattttatggaagttaacaacactcaatatcaaacgatgtctatagaggacatcatggctgaactggatccactgattacggttgatccggctgatcgtaatttagatcaaatttcgttgaagatcggacgttcctttatgacagtgcagcggcattacattcgtgaagggcgttatctggaatatctgactgggcggtttaaacagattgatgtttatctgcggaggtattatgccggggaattacctgcgcaatcgtaccgagatcgtcctctcaacaacaaaccactgaaaactgatctgcctctatgggttcaggctgatgatatgtatgttgagatgtcaggtctcctccaagagcagaaggcaaaggtgaaattcatagaaagctgtttggatcgtttgaacaagctgggttatgaagtcaaaaacgccatagattggcggaaatacatggacggtatgtagtgatgagccgactccaggcactcaagaagatcaacaatattgaggaacgtcaatatacatttcagcagtacgaattaccgtacaaggagctgacttgtgtaacgaacgagaatggacgccattacgtttccccaacaggggtgaagttaacctctgtaacaacaatgttggggcgtaccagtgaccatacatggttggatgcctgggtcgaaaggcttggagttgaacaagcagcaattgaaacacaaagatgcgctgataggggagaggcagtgcatcttgcttgtgagttatatctgaagaatgccccaatgaaagatgttgtggccgccgccggacaatatctgttcatgttcatgcaattgtttccctatctgaaccgcatgacaaagatatatgctcaggaaatacctctatatagcgaagtattgggcttggccgggcgtgtggatttaattggggtgtacaacggaaccccagcaattatcgacttcaagacttccaatactctgaaaaccagggacatgatcgaggattatagcatccaattgtgtctgtattcagttatgtttcaacagatgtttaatgtcaaaatcgagcgtctcatcaacatcatatctaatgagaatggtttactgccgacagtaatagaattcgacagaaaagatattctcccaaaaatgttcgagcgcgtccgtttatatcaccgtatggacaaggaacagaatggaatctgggcagaccgctaaatactccatataattgggaggattggtatggccgacatttctgtgaccaaagtgaacgaagtccgtatgcgtgtgcatgctgacgcagggatctatgaagaactgaatgattatttcaaatttgaagatcccaactttcagcctaatcctttcagcaaatgggatggcgtcgtccgtttatttaccaaatcttccgggttgatcgacatcggtcttctgtttgaactcttcaaattttgtaagaccaacggttattcacttgacgtggatcctgaattgaaatatatccaggacatccctgataatgaaatccatgatttctgtaataatttgaaaacacaaattcgcacagaatctggggaatacattgatgctgaagttcgacagtatcaattcgattccatcgccactgccatgaggcaatctcgctgcgtcctcgagctggctacaagtgccggtaaatcctttattctttatgtgatggcccgttactacagggaaaggcgagaagcgctcgaaagtaatctgaggacgcttatcgttgttccttctgtgcatcttgtcagacaattgtacgagaacttcgaagaatacagtcatggacaatcctggaacccgttctaccaggtacaaaccatatgcgaaggcgcaacccgtaatattgacaagcctatcacaatttccacatggcaaggcatacaagaccagccaaaggattggtttcatcagtttggtgacatcattgttgacgaagttcatacttcaaagtcagataaactttcatatatcctcaacaactgcataaatgctgaccagcgccttggggtgactggtactttggcgaatactaaggttgctgggttgcaggtggtatcccactttggtgcctatcacaagatcatcacggctcgagaactgatcagtatgggatatgcagctgacatcaaaatcaggatgatagaattgaaacacagattggccgacgctattgatatgcatggtgccgattatcagaaagaaatggaatatttgatatcgaacgaagttagaaaccggcttatcgccaagatggctttaacattgaagggtaacgtcgccatcatgttcgaacgtattgatgcgcatatgatgatcgtgtatgacatcctcaaagaaataaagccgaacgtatttgttatcaacggggaagtcaaatcagcagaccgcatgcaaatacaaagggcgatagaagaaggtgaggatattactctgttggcatcttatggaacgatgcaacaaggggtttctataaagaaacttcaccatctggtattggcacacccaagcaaatcatatattcgtgttatccagactctgggaagattgatgcgtcagcactcaacaaaagacgtggcactcatatgggatttggtagacaatttgagttataatgggagttacaatcatgcgttacgtcactctcacgagcgatacaaattctatttgacagagcgccaccctgtagaattgaaaagagtggcgctggaagattatttggggtcttgatccacataggcgggcgttggctcgccttcttcactgtcgtcaaccaaacccaggaatgcgtcgatactatcacaacaacgttgtaacagttccggcttgatggttttgttgatgatcgcctgatttttgttgatcagagggaacactcttaattcgccgaagttgctcatattgacgatcgcaacataaagccctggcttggtattaccagacaggaatgagaatgggacttctttggcagaatcggattttgtttcatcaactaaaaccttcaaaagagtagttgttgatgtctcactacccaatttccggcttgccatatctccgtggctgtaccctacggcatagattgctactagttgtttcatgctattcatctcgtgttgtttacatccttatataatagtctcatgttatgtttagaccaatttaaaataatttgcctttcggattaaaaagtcctttcttgttgaacaaatccgtcgtactatacgagttgtgagctttgcgagcaacgagtattaggggtttacgagcgaagcgagttgattaatataaattaatagattaatctatttcgttaataatttgcgcgcgaagagatttaacacttgttctatatccccaaatgggcgatactaaattgcgtcaacaacatgacttgacttcactatatcttgaggatacataaatgcaagaaattactctgtcggaacgcactctgcaacttctggctaactttgaaaccatctgcccgtctatcgtcctgactcctggcaaaaagctgcgtaccgtaaatgacgcatcgacggttatcgccatcgccgatatcgacgaagactttccgttcgaattcccgatcctcgacctgaccaagctgctggccatccagcgcctgccgagctttaagagcggcaagatcgaaatgtacgaagatcacgtgctgctcaaaggcgaaaactctcaactgcaattctggcgctcggccaaagaactgacgactgttccggctgataccattgatctgccgtcggttgatttcgaagcaactgtgtcgccggaaaaaatgaaagagctgatccgcgcgtgttctaccctgggccacaaaactgtccgcatggtcgccagcggcggcaaaacccgtctggtgggtactactccggcaatcgacaattccaacgattacaccgttgaattgggcgaaactgcgctgggtgatttctccatgccgatcgacgttgtcaacctgaaaatgatcgaaggcaactatactatccgcgcctgcactgaaatgcagctggtcaatttccaatcggtcgacggcaccatcaactattacgtcggcatgcagctggaataatcttcaatatctatctgttgctttaatatcgttgcaggggcggaaagcccctgtattttgaaacgcatcatctaaagaggctgtaatgtctaatatcacaatcgttggtgaccaatacgcatgggaaaacaaatatcgcccggacaatctggacgaaatcgttcttccccaggacgtccgtgccaagatccatggctatatcactggtggtaatggcaacatcccgtcaatgctgttctactcaccgaaaccgggtactggtaagaccacgactgctctggcggtttgtaatgaaatcggctgcgtcaagccgctgatgatcaacgcatccctggacaacaacatcgacaccatccgcgacaaagttatccagtattcgactggcgtcagcgtatatggtggacggaaagtcgttatcctggatgaagccgagcgcctgtctatggccgcccaggaatcgttgaaaggtattatcgagaaggtgagcaaaaactgctcttttatcctcaccaccaactccaaatcccgtctgaacgaaccgctggtttcccgctgtcgtgaaatcgacttcatctggaccgacaaagaagcacatgaagtacagctacagttcatgcggcgctgtgctgaaatccttgctgctgaaaacgtcgaagtcgatctgaaagtcctcggccggatcattcctcagttcttcccggacaaccgtaagatcatgggcatcttgcaagacaatgcctccacctatggaaaaattgatgaacgcgctctagccgtcgtcaacgcaggcggtatgcgccagctggttgaagaaatgaaacggaacaactgggacggcgtccgccaatgggtaactgacaatcagaactacatcggcgacgatttctactctcgcttcttccatttctgcgtgccccaggataaagacaagcctcgggcgattgaaacaaccagcattgttgacatggtcgctctttgtggtcaggcacagatcgaacatcgtcaggctggggacgtatggcttcatgctgtctatttcctgactaacgtcatgctcaacattaagtggagctgattatggccgctccgtctttgttcgatttcctgggtgcgttgaacaacaccaaagagaacctcttgcaaacggacgaccctgatgttcgtaaggcttttgatccgtttatgacccggcgcgggctggcacagaacaaagatactcttgtcatcgcccagcggatgaatttgcttcacaaggtcacgccgtggatgcaatggaacatggcattccattctatcccggctcgcaagcggtatgggaagtgggccaaaaaaggaccgcttgatcctgatattcagatgttgtctgagtattattacatcagccatgaaaaagcatcagagtatctcaaatttcttccaaaagaagcactggccgagatcaggaagaaagttgagttgtccaacagcaacgagaaagcgaagccgcgcaaggctaagtagttaaaatcattaatgaaggagtttggtcatggcgcgcaatacgctcgacatcttaaaactgactgcggtagacgatgaggccagcatcgtcgactgcatggtcgaagttgaattaaaccaagataaaccggggatcttcctgggtatcaaggaaacactgagccgaatcggggttaatactcgtcaagagcctgaaaccctgtaccagacctgccatattcttcataaatctggcaagtattttatcgttcatttcaagcatctgtttatgctggatggacattacaacggctttcagcgtgaagatgtcctgcgtatgaatcgcatcattcgtcttctggagcagtggaagatgatcaaggttctgcatccggaacaagtgaccgaatgcgccgacatgtcccgtatcaaagttgtgaaacacgatcagatcgccgattggaaactggtccccaaatatatcattcgcccatctcgggccaaaagcgaataactggagtcgctatattatgacaactacatttagtaagaacgtgagactgaatctggcttttggtaatgctaaaggggacgtaaccgcccccgactttagcaaaattcgcaatcaggcgaaactcgttctggaagaaaccaaagaactcctggaagcggtgtatttcgatcaccaggtggttctgacactggaactgaatccccgggaaagcgaaacgccgactactactgaagatctgatgaaagccatcatggatgcccagggcgatatcactactgtcaacgacggcgtggcgcacattgctggcttcgatggtgatgaatgtctacagcgcgtttttgcttccaatatgagcaagttcatccgcagccaggaagaaattgtcccggcgctggaatattattacaacaaaggtttcccccgcgaaagtcttcgtgtggaaggtgaattcccgcaggcctgtgtgaaagttactgaaactgtcacggtggatggaaaagaatacccggctggtaaattcctgaagaatatggcagctttccaggaaccggacttcagtgatatgctgacagccaaccccgaacaacagatcaaaactatcgttgccactcaggcgattgaaccgggtagtatttctgttgaccacaccaacgggattgcatatatccatgtggacgacttcagaacattcctttctggacaaaccgaatattctactggtagtgttgtcggcaccaaagagcagacagaaagctatgtccctgtctacaaaattgggggcgaaaattgtcctccgctgaaaggtgtctgggaagcgaacgtccgtgtattcgtatactccccgtacaatccggaagtcacgcagctgacccgtatcgattaagtcattccgcgtttcaatatacaacagaggctataatggcctctgttttcgtattctaagaagaggataccatgaaagacaaacagtcagacatccaatattgcggtgtccgtgaagataaaatcaaatcggctgatcctgtcctcagccctttccatcgtaagctatcctatgattggatgaatgaacgttacaaaatccacgtaagaaaggacgtccagcgtcttcctgccccctggacagaaaatgagatactacggcaggtcaagttctgtaacgtccggagagagcacgacaggcagtctcagcacctcatccggaatatcgtcgataacaacaacctgtctctggctgacaagatgttcaactgccttctgttccgtatgttcaacatgtgggatcccatccagcatgttctggaaggcccggtttctatcaatgatttccgcaatatcaatttggaccgaactcgtgaacggtttgcggactttgataaaaaaggcggcgtcacgttcaccaatgctttcaacacaggcggtctaaagcaatgtttggccttccctgaactggccgtgactggtaagccagccagccccagcaaaatgatggtgaaagtctttgagaaagaagggccaatgcgtttttatgttggagaaatgaaatataaagatgccaaggttctggcggaatcaaacccagggtcagtaacgattgaaggatgggaaccgcatatgggaatgcgtgttgtccgattcctgaaagcgtttgttacccataacccacatttcttcaatgtgttgttggggttcaattcaccgctatctgtttatgaagaactccttaacaaagttgaaggcctcggtccattcttggcatatcagatttgggttgacttcacatacaatccggattatccgtttagtgaaaaccatttcactatcgccgggccggggtgccgcgccgggattgatctgttattcctggacaaggacggcatgacccatgaagagtgcatcttctggctgcgtgacaatcaggatgatgtgtatcgtcaatatggttatgaccgaaatgcgttttggtcagcggaagaatcgtatgatcgttgtatgaacgtcatgcagctggagaacatgttctgtgagctgagcaaatacacccgttgtgttgaggcggtcatgcgtggtgaaaagcctcggggcaaggtcggatacaatggtggggaagtgtataccgctcccaagattcaagtccgctccatcaacctcctggaaaggatgaagaaatgaaacctgtgaagcgtcatcgttcttggaaagtatgcccggcgtgttcaagccgggccacaaagatgtttgactttgggactggattgtatcgttgtcagatctgctctcatcgttattcggacccagctggtcgttctttggttgataagaagtacaaattcaaaatattattgggaaattctgaacaatacgaatacactgtgatgggtgactctctttctcagattaatcttcacgttctggaaaagatttcccattatgacaaaaattgtgaacgtcctgtgcgagttgtcaaaactccaaagggttatccggaaggcactcgcagtgttgtcgtggctggatatacccgtttcgatggtaagaaattcagaagtatccgaattaatatgatcccggtttaaagttttcaataactgtaatcggggtatattgacctcactttaacgaagcgcctcaatcggggcgcacatttgaactgaaacaggaagactatatcatgtcagattttaaacctttcgcagttgctgtaaagaaccaaatctccgcgatgtccagcaatggcctgtacatgacttcggttgacaaagacgccctgtgggatctgtacctgtcgtctttcccggaaggcacgaacaatatctatcgtgagcgcactgagcacgattgcacctgctgcaagcaattcatccgtaacatcggcggcgtcgtatcgattgacgctgatctgaacctggtcactgtatgggacagcgtcaaactgggcaacgaatacgacgtggtggcagcggcgctggccaaatatgtcaagcagcacaacatcgtcggcgtctacttcaacgattcggctaaggtgagcgtagaaagcaaccatgaaatgggtgaaaacggtaatatccgcacctacaaccatttccatgccgttctggataataaattcgtcctgcgcggcgaagatatcgcctctaccaaaggcgaaatttcccaatcgatcgaagtgtttgagcgcagcatgcgtgagctgactatggaatcggctgaaatcgtcctggaactgatcgatcagaattcgctgtatcgcggtgaagagcaccgttcggctgtgcaaagttttgtacagagcaaaaccgaatacgctaaaattcgccccgatctgaaacaactttgggcctggcgaactggttggttgtccaaaaaccataaaccgttcggcatccgtaacactgtcatcggcaccctgctgactgatctgtctgacggcgttgaaatggaaaaggcggtgaaatcctttgaaaccaaagttgccccgaccaactatcgccgcccgactgccctggtcacgaaaggtatgatcgaaaaggcgcagaaaactgttgctgaactcggcctgactgaatctttgggtcgccgctatgcgaagtatgaagatctgacgatcaacaacgtgctgttcgccgatatcgatgcgcggaaagctatggacccgttcgatcaactggcacaggaagtcaaagtgactgaaaagtcgctgggtaagatcgaagagatcagtgttgatgatttcatcaaaaacgttattccaaaagcgcgttccatggaagttatgttcgaaggccgacacactaccaacctgatgtctctggttgcaccggaaaccgaaggcgctccgggtctgttcaagtggaacaacaacttctcctggtcgtacaacggtgaagtcgctgactctatcaaagagcgcgtgaaagccgctggtggtaacgttgattcgttcctgcgtgtgtctctggcctggttcaacaacgacgacctggacctgcatatgtacaccccggctaacgaacatatctatttcgctcgcggttgccgccgttcttatcatactggcggcgagttggatattgatatgaacggcatggatgggatcaacaaagagcgtaagccggttgagaacatcttcttcagcgatgaaagcaagctgaaagacggtgtgtaccagttcgtggtggacaactactcccagcgcgaaatgatcgataccgggtttgttatcgaagtcgaatacaaaggtgatctgaagcgctattcttgcgaaaaaggtctgaagcataaacagaagttctcggtagttgaacttcatgttaaaaatggcaaagttgttgacgttcagaccccactgacgccgactgctggcgtagaaactgaaatttggggcatccgtacccagaacttccagaaggtacaactggttctgaattcaccgaaccattgggacggcgaacaaactggcaaccgccacctgttctttatcctggaaggttgtgccaacccgtcgagcactcgcggcttctacaacgaatatctgaagccggaactggcgccgcatggtaaagtttttgaaatgcttggcgctaaaatgaaagccgagccaagcgaaaaacaactcagcggtctgggcttctcttctacacagcgcaaccatgtgctggtgaaagtaagcggttcttttaatcgtgtggtcaaagtcgtcttttaagttaaaatataaccaaattcatagaggatacaaaaatgtttgataaagcaacccgtctgaaactgcgtttcaattccaacaaaggccagctgtccgttgagcaggtgtgggacctgagcctgactgccctgaacgaaatggcgaaaggtctgaatcgcgagctgaaatcggccgcagtcgatgacgaagatttcatcggtaacaacacttccgtcgactccctgctgcaactgcgctttgacatcgtcaaaagcatcatcagcaccaagctgaaagagcgcgacgatagcctgtccgctgcggaaaaacgtgagcacaaccaggctatcctggaactcatcaagaagaaacagcaagaagagctggcgggtaaatctgttgaagaactgcaagccctgctgaaataacccgccgtctttggcgaaataatgaaccccgccatgtgcggggtttgttgtatgaggaacaactatgacaaacagaactggtatcaaactcacccccgatgttcttaaatctcacattgctgaggtcatttatgaagaccgtgaagtgggaggtcatcgggttatcacttgccacttcaaaatggacaacgactttgttgtatggggtaaaaatagttctacgtctgttgaccccaccaactttgatgaggagttgggtaagaaactggcctacgacaaaacgttctctcaactgtgggaattggaagcataccgggctatggttgttaaagattttatcagtaagacaactgaagaaccatttataaatcttgaagattatattgaagatagtcggacgatacgattatctattggccccgactatcgggaaggtgtggccactgcatattctattagatcgattaaatcaaataaatttgggttgttggatcatattgacatatgtctttataaaaccgataacaaacgacatgatgaaatcaaaaattctgaagcaatacagaaagcaaaggattttatcagatcccatatggattatgctgaaattaatagcgaatttgtaattcatatcgcaaaactttgttgggccgcccggtcagcggtcgtagacactacacctttgtgggaaaactgtaaagaaacagaccgtcaagatatgtgtgacacggttaaaaaattgctgttatcccccagagattatcaaccgaatgataatttgttgaaattgttttgggctattgtatcccaatttagataacaatgacgcctggtatatttgctgggcgtttcaatttgtgcatcgcagtataatacggctgtacattaaaccatgaggctacattatgtttcgtttgaaattgaacgaccaagatgtgttctacaaacgcttcaccttccctggtggcgaggaacacgtcaagatccaaaaggcgggtattcctgtgggtcatgtcaataacgtgaccattgatgctcacatcaaatcctctgccgacttcattgagctggccttgctggttaatgccgtgcgcggcctgggcaacgtggatcgcatgaccaccttccatgcatacatcccgtatttcccttatgctcgccaagatcgctattgtgacttcggcgaacctctgtctgtcaagtgggcagctgatttcgtcaacagccttaacttcgaccgtgtggctatcaaagatcctcacagcaacgttgtatcatctctgatcaataacgtacacgtggtccaacaagactacatcgtccgtcagtatctgggctggttcatccgtggtaacaatgctgtgttggtagccccagacggcggcgcggcgaagaagaccgaagcactcagcctgtccctggatggggttcctgttgtctatggccacaagaaccgtgacaccaagacgggtgagatcatcggggttagcatcaccaaccctgagctgattgaagatcgctatctggtcgtggttgacgacatctgcgacggcgggcgtacatttgttgaactgggcaaagagcttcagaagcacaatcctaagcatatgacgctcttcgtcacccatggcatcttcagcaaagggctgtccgttttcgacggcatctacgacgctgtgtatgctgatacaatctggtggaacaacattactgctgatggcgttcctttcaaaactgaaaatacaggacgtgtaaaatgagcatacgccacttagacccgatccacgcaatcgatttctacaaatcaggccacatctatcagtttcctgaaggtagtgagctggtgttctccaacggcaccccgcgctccaacaaactgttcaactcccaccttccgaagaacggtgtggttgtttggggtatccaaggcttcatgacctggttccatgaactgtttgacgaagcattcttccagcgcccgaaggccaaagtactgaagaagtacgctcgccgaatgaacaaagtactcggcccaggccgcgtcggcacagagcatatcgaagccctgcacgatctgggatatctgcctatcgaagttcgcgccctgcctgagggcaccatgtgtccgtatggcgtcccggtgtatgtgatgttcaacaccctgccgcagttctactggctgaccaactatctggagactgtgttcagttccgagatctggaagccgatgacgaacgcgaccatcgccctgcattacaaggcgctgatggtgaaagccgctatcgctacaggcgttgcgccagaccactggttcattgactaccagggacacgacttctccttccgtggcatgagcggatggcacgacgctgcctctgctggttctggtcatctggtgttcttcaaaggcaccgacaccaaccctgcgctggacttcgttgaagagtactacggcgcggacgaggacgattatgtcgtcgctggttccgtagccgccaccgaacacgctgtgatgtgtatggggacgaaggacggtgagttcgatacttttgaccgcctgatctctgaagtatacccagacggcatcatcagtatcgtgtccgatgcttgggactactggcaggtcatcgacgactatctgccgcgcctgaaagacaagatcatggcacgtaatggcaaagtcgtgattcgccctgactctggcgatccggtacatatcgtcggtggctaccggattgaatcgttcactgatcgtgctactctgaacattagtggtgtggcaagcagcaccgaagtcatccatattcaggagtctaacacctatcacctgattacaggcgaaggcacgatcaactccctgatggctgatgaccgcaatatcatcagccgttctgaagcggtcggctctatccagcgcctgtgggagatcttcagcggtactcagaccgagaccgggcacttcctgctggacgaacatatcggcctgatttacggtgattctatcaccctgagccgcgaagaccagatttttgctcgcctggctgctcgtaacttcgcctccatcaacgtggtgtttggcatcggttcctacacctaccagatgaacacccgtgacagcactggtacggcggtgaaggcaacggcgggtaaggtgaacggtgaattccgtgagatcttcaaagagccgaagaccgacaaaggcggcaccaagaaatcagcacgcggttttcttaaagtcattaaagactctcagggtaaactagtgctggttgacggtatcacctttgatcaggtacaggatgccgataaccaacatcagctggtctaccgtgacggcaagttcttcaacacccagacgctggaagacgctcgtgtcctcgccgcgcctctggtggcagaactggccagtcaaatctgataaccgaaggggaggtaactcccctgttttgaggaaatcccgatgtctgttaagatgaaaggtgccgaatttaaagcatactatgacgactcagagtattgggttcaggatgcttggcatgattatcacaacataaaggttaatggggaatatatcgatgatatagaaagcgaaagtattcccgatgatgctgatgttgtcattgagtcagggatagtttatatccccgttaaaagtgaatccggttatgaagaaaaagaagtccaactggttacccacttcaagaactggcgcaaacagcagaaattttctactattgttgtggtagttgaaaaagacaaagctgaagaaattatagcctcaattaaaacgatacctggcatcaataccgtcaagtgaggcgataatggattcctgtctattagatcccgagaacgttcttgtggttgaaattgaaaacaacaagccgttcattttgaaaatgttggagaaggataataatcctgaaaccaatcctaaactatcccaaaaggggaataacgatgattgaatcattagaatttaagaatgccacacagacggttgctccttccaatcacgtcatcgtcgttgacatttcttattccatgtgctatgctctgccgaaactgcgccagcacctgaaagaaaacctgccctctctggttaagccggaagacaccatcagtattctgtacttctcttctcgtggcgacttcggtactgtgttcgctgggcgccaggtcagcaacgcatctgacctgagtgagctgggtaaactgatcgatcgcttcctgcaaccgacgggctgcaccggatttgttgagccgctcaagctggctatcgaaaccgccaacgatctgaaaaagtccggcgtcatcaattccctggtgttcatgaccgatggctatgacaactgctggcgttccagtgaaatcctggccgttgctgagcagctgccaaaggcgtacgacaacatcaccctgatcgaatacggctggaactgcaaccgcgaactgctgcagaaaatggctgagtgctctggtgcaacccatgtattcgccgaaggccaggaagaatatcagaccgaactggaaacagcgatggtttctgtcgccccgcgcgtccgcgttgatttcagcgtcatctattcctatgccgtttatatcgaaaacgggattccgaccatcctggccgcccagtctgatgaagaccatcctatcaattacgtcaacatccctgagagcgtctctaagctgtgggttgttgatcctgacatgatcgatcaactggataacctggcggacgttgaagcggcatatgtgctggctctctttggcgtgcatactatggatgccgatctggtgtgggccgcgctgaaaaagactggcgatgtgcgcttcattaaacagtacaccaactgcttcaccaagcaggactattccaacatcaaaactgacatcacagcagcgattgtagacccggcgctgcgcggtgtggacggtatcgattacaatctggtgccgccggaagacgcaactactgttgttgatgttctgacttacctggcgggagcagatgcacaactggttgttgaccatcccctgttctcttacaagcggatcggtcgcggtacggtacaaaaagccgatgataccgaagacaagctggcggcagaaattgccgaagccaaatctaaagaagagcgtaaagcgctggccctgaaactggctgagcacgaagactggactcctgtgtttgagccagtgaaaggcgcgggcgttcccatcagcaatctggtttacaactcggcccgcccgaacatcagtctgcagactgtgcaaaacgggaccgtcatcatcccgaagttcgcacaaaagaaatacgatctgccggaatctattgatacatggcagtggaagaactacaccatcgtcaaagacggtatcatccatatgaagacccttcctgtggtctgctcggtggaaaccgtatctgaactggttggcaaaggcgttgaagtttacggtgggccggaagtgttcatcgtaaatctgggcagcgttcctctggttaaccgcgcgatggttaagaacatcagcgccgcgcagttctttgctgaccacgtccgtctggaatccctgaaagccaagcagaaggttctcaaatacttccgtgacgaactggttgggaaaggtaatgccgtgggcctggcgggcaaatacggtttcgaagcggctgagtttctgtctgcgaatggcatccgcgattacggcttctctccgaagaccgcttcggttgagtctactgatttctacatgagccgcgaactcaatgtgaagatcaaaggcgcttcctcgctgccgtcaattcccgccgttctgaagaaacaggcggacaagaaacctctgaacgctgcggacaaactgattgccaatgctctggccgaatacaatgcctttgtcaaatctccggcggtgacagcagtcccggaagcaacgcaggccaagatcattgaatcttggatcagtgacgcggccaaagcagctatcactcaagtgcgtgaactgaacaagaccctgtctaaatcgatgtatgccatcgttgcaggccatggctggttcaccgacctggatctggaagagtccactatggaagtggaagttgacggtgtgaaatataccgtcagcgcagtcctggaagagaaagagatcaaaatctaaccaactgagccggggaaacccggccttttcataaggtgttattatgtctaagaacgtgtcttatatcgatgttatgcgccaccttgttcagtatgcaggtgacaatctgaatatggagttatggcgtgaaaaataccactccgaaacgatacaacgtgctgtcgacaacatcgataaactcgaagatcaattagaatcgctggccccgttgcgcgtcaaagaacatctgggtggtgatgaacttgacgccatcgaaatcatcatggatttggaagaagaatatgatgtagagatcagtgacggttgggtcggcaaccacaaagatgacccaactctgggtgatctggctgaatatgtggtgcgtttagtcaataaaaacggctgaactggtttacttcttcaataaaagaaactattattgaattcgtagggcgggaacggctcccgcttgattgaagaaggtcctatattatgagcaataagaaagtcgaaaccacggttgaaatagaaaagaattggggtttcctgcgagccaaaggtttccgccgtgtgtatgccgcgaaggaagtctatgtccagcgtaaagacgttataataagcaagaagggtaagtcctgggtggccgaggaagtggacgaagacggcatcgtaggcaagattaaggccaaggccgaaatcctcttctctcttctgaagcaaatcaattaaaatcaataacacgggcggggtatgattgccccgtctatttgaaacgcaggatttatatcatgaaaaagttaatcatcgccgtggctctggtcaccctttctttcgccgcccatgctgatcgtgtggtaaaaggtatctcgtttgacgggaaatattccttccaggcgtttggcgccgacctggtattgacccaaggtaaaaagaccatttatcgttgcaaatacgatgaaacgatccgtgggatagataaggccaatgacccgtatattctggacatttaccagtgtggtcaaaaaaccctgggcgtaaaaactttcggtcgaattgaagacggcggatgggtaacagttttggcaactgtcaataacaaaactgtggaagttttccagaaaccgttcaatatttacactgaggcgaattcattatgatcaagaacccaagtattcatgatgcggtgacaaatattgtcagaagggaatttgattgtctaagggttccggctcggcgtattactcgcttattggaggcgaaagtcgccattgaagaaggtgatactaaatctgcaatgttgtcgatgttggaagtgattgtccggttgtctgatgatgacaatgttaaatctgtagacgatctaacaaaacttctaaacacaacaattcaggttcgtttagatacaggactattcaccttacgtgaactgatcaaagaaggggttggaaaatgattattaattgggaattagtcggattggtgctcagcattattttcggcttggtgggtgtaatttgggtaatcattggcatctggttctatcgtttcttcaccaaatatgagaaacgcgatgctgaacgccgggcgcgtcaggatgatattcgaaatcgccgggagaactggtgatggaagaaaatgtctggcatgtcattggcggcaatcttctgggtattctgatcgtctggttctgttattggtttggtggcaaactggctaaatttttccacgggcgtgactaactaagggataactccatatcccgaggtgtgccatgtttctgacttcctttatcgactggatgaatatcatcaatggcctgaggattcctgtgggaaacctcgggctttctcgttcttctatgccacaaattgacgctgataaacagcaagacttccatgattatctggaagacaacggcgtcactatcgatgcatctcaagttccgatccggtcattgcgtctgacccagaacgaaatcaacaaaatgaaagtctggaaaataatgaaacagatcaggaacaagaagccgatgggccgggtttgggtgtcgtcagacaattacgtcgttgatggttctcatcggttcgtcgccgctctgaatatggatgggaagcagcgcatgaaggtctacaaagttgatatgcctgccatggaatttgtcaaattagctcgacaattcaatggtgtgcgttatcgtactgtttctgatgcgcgtttctgaataaagaataatattgaaaacctttactcaataatccttccgaactactatttcctcaatgaacaagagggaatcaccatgaaacgtttaatccttggggtgctgctggctggcctggcgctccccgccgctgccaaactgaactccacaggcgaaaaactgtggggagatctttcttactgtgctggatggtctcaggctgttgccatagacaagactggttccatcgagaattttgctgaattgtggaatacgggtaacgtcactgatgctgtagttaatgccgggattgaatttaatcgttacaaacaaggagcctataatctgaaaggctacctgaatgatgacaaattcaacaaaggcgggatggacgcagcagatctgattatgaccgggcgtatgggtacagcagggcgaatccaggttagacaatgccgtgcacttcccatcccggctctacagaaaggcgtcaccatcggtcgtcgtcatcttgatcttatcaacgatggcaaccagtgtgtcaaagtattcgaatacagcgcagaccaggttagtgatccacgcctgaagaaagaatggcggactcgtgctctggggcttcgggcctggttggtagagaatgatcattactatcaggacagggttgatgcaggtctcaaagatttatcgactaacttgtctgtgaatctggatgatccaaggctttcccgggaactccaacagacccgtattgactgtgacaacatgatgaaggagaacgaataatgtgcgttaaaaaatctactgtcgttatcgtctacctgattttggtcggtgtctttggtctctgggcaaatcatgcattggcgattccggctaacaatctgaataaatgcgctgcatggttgtctacctatcagcaatttcatcctgacgataaagatacttccattttgctttcagattttgaaggtgaaatgaaacgtctggatcagtatagcacagaccagattgagaatgctttggatttaccaatgatggaatccgccgccgacaatagtcatcaaactgttgttgatttaacgtattgccgtgacattgcgattaactttacccgtaatcaaaaatgaattcgggttaaaatttaaactacaaattgaaactgaaagggtgatttcgtgatgctgttaaccaaaactatcgttgaggctttgattgaaaagaacaaggtgtttgctcccaacgcggcgaagatcattgcagtccatgaagatgggcggattatcttcgccgagaagttcgagcaaggtgtcaaattttggtattccgacaccatgcgggaaagcaccatgcaggggatcatccacaaactgacgttgatcgccaagcgtaatgatcaaggggattgggtcggtgttgctgacttcagcacgaagattacaccacctgccccaaaatccagacaagaacgtattctggaatcacaagaaaaactgcgcgccgcgcgtgaacccaaacctaaacctgctccggtggctaaagttgttgatgtcaagcccgtaattcagcccgtcgttgaaaaggttgaaaccgaaatggcatctgatttcatttcaattcgagatctggatccgttatctcggcggtcgcctgaaatgcttttcatttctttcagagcgaacgggaagattatcatgagcaagtctttgcgtgataaaatgtcctggaccactatcaatatgttagtgtcccgagacttcaaacgtttcgctgtggcggaagggaaggagtataacatcaaccggagcggaacatacgttaatcgcgcgttatgttccaaactgtctttcccagaagattctggtacagtccgcgcaattttggaatgggacgacaaattgaatatgtttgtcggggaattccaataatctataatatcggggcggttataatgaccgcctctttgatttgaaggaatatattatggcccacatatggtgtgatgtcttgttggttttgtatacgacggccagaaacgataaaacaaattctgcgttcttcccagttccattttcatcaggtggaatgactgtcgcacgtattcttgaaatagagaaacaacttgggcaacctactatgttcagccaggttcaagttgtggggtatgaactattaaatgaaatgttgatacctgaagtttccgtggaaagggttattacaaaccgatcaacgatggcacaattaatagagggaaataaaaatgcctaacaaatcttttgaattaaaattccgcgtttggcacgtgccacaggttcccgggaaaatgttcatggtggaagttcccacgtatgctgaagcagaacgtttgaaatcggcgctggccgattatgatctgttccagtacgagaacaatatcaagcccgattattgtaatgccagcggtattcagatctaccaacacgacctcgccgaagaagagatcgaagaaatgggccttgatgaccgttgggttgacattgaggacgatgaagatctacaggaatatctgaatcaccttcgttctacgggctgggaaataaaatcatgaccatgatcaattcgtatattgttcaaaagggcgatacccttatggggatctgtatgaaattttattcagatccctatatgtattcagatatagcgaagtacaacaatattattgatccgaacaaaatctacatcgggcaggtgattaatttccctcgacccgtcaacgatccccaaacagtcgttattccggtggaacccactcaggagtgtttggatgctatcgctggtttattccaggatgggttttgtgatggtcgtattgaaagagatatttatgccgccgttgtgcgctcggctctgaaccaataaattattgggtatcggtaaataagcgctttattcaataaaatttgttaggtaagctgtaatcctcttgtagtgaacacagaagtaaacatttaacataaaccaactggagtaatccgaatgaatcgtcaagaatttgtcgctcacatcgcccaaactcagggtgtgaccaaaaccgaagctgaaaaaaccgtcgcgtccttcatcgctggtatcaactctgccgtcgctgccggccagtccgtccaattcgtcggcttcggcaccttcgaagtgaaacatcaggaagcccgcgctggccgcaacccgcttaccggggctgcgctgactatcgaagcgaaaaacgtcgtcaaattcaaagtcggcgaaactctgaaaaacgccgccaacggcaaataaatttcagtgctgatcggcctggctctacaaagtagggcgtggcaaaaggaaaagccggggattgccccggctttttcgttcttgggaatcgggtaaactataccaacatccccaaaggagaaatcaagtgacagcatttaatcagcatgttaaagcgctggagactcttcgcagagaaataccaatagaagaaatccagaaattggctgaacaatattttccttatgaccatgccaaccccggccaaatggaatgtattgttgaagccatagatgctttggccaacaagaaattcaaacacgtgattatcgaagctcctacgggagtcggtaaatctctaattggcacaaccatccatcaggtgttacgccatcttgttcttgaagcaaacccctatggccaatttcgtacttccatttccacgccgaccaaaggtctgcaagatcaatatgcagctgaaaaagccgttgctatcgatatcctgaaaggcaagaagaattatcgctgccatatgcatccggatatctattacaacgctgtacaatgccgtatcgcttgccgggatgggcattgcagcaagaggcgttgcccatacgttcaggcgcgtaacctctggaccaatatctcgtccctacgctgcacgaacgcggccatgatgattgagatgtgcaccaccatttgtatgaagccagaaaaccgggccgacatgcttattttggatgagtgccataaaatgccctctacgctcctagaccatacgatcatggaatacaatacgaaggtattggaaggactgagatcgttgcctcaagggaaggatatcgtccaagcggtaacagagatcgttcaccattgtaaggactacgagttagggaaactgtattcgttggatggatacttgtttgaccgattccttgatcttctggagaaggttgaagccattttaacagaactggaagaacttgttgaggacgaccgcctaaccgaagcccaagtgatgaagctggccgatatcatagacatcctccataacttatcagattattgtggtatcatgtcccagacgcaggccagtacctttatcgtacaggagaagggggaagatttcatccaattcaagccagtcatagcatctgacgtatctcagttcggtctgttccgcaaagctgattatcatgttcacatgtcggcaaccatctgcgggattgatgcgtatgcgcgttccttgggtattcgtcctgggcaataccataaaatacagattgggaacccgatcccgattgagaatcgcaaagtgaattacatgccggttatgaagatgacgaacaacatgggtgactatgagatgcgtcagctggcggggtttgttgacgagatcatcgaattccatcaaggccagtcgggcatcattcatacggtgagttatgaccgggcgctggcgatacagaagttcagcaaatatcggaacatcattcacgttcccagaacccgcaaggctctgatggaactgatggataatgctttccgtacgaagacaccgtgcatcattgccagcccggctatggaagaagggtatgacttcaaaggagattatagccgtttccagatcctcatcaaggtgccatatgattaccttggtgacccattggttgcacatatcaactctgtggatccttcggcgtatttccggaatgctatactgcgtatcatacagatgtgtgggcgttcggtcaggggcgtgaacgactgggccgcgacatacatcctggactcatcctttgaatccttgatgatgcgcaacccagagttctttccaacttggtttaccgaggcagtgtttgaagtttaataaccagcaataaatgacaggcgacatttgagattcggtgccagggatgtcagggatatgatcatatcatcactgtccatactgtactcaattgtcgccagttgctgggtttgaacattgttgtattcactgtagattaagtcctcaccacggaaaccgatctttccatctgtgtcttgccaatgaccttgtgtcttgtcatagacatggacgcggaattcaaccatatggaaaagggcttttggtatactcttcaatatactggtaccgacgaccggaatctcaatattggcatcattggccccgccttcatatactggcgcccaattgaatataggatcaccaccagcgaccggagtccttttccaatattggaattccgggttgcctgaatcgtttttctgcaacaatatgacttcgccacctgtaaaattcgtggtgtcaatatcatctcttgctaaaatatccgccggggagccgataaatttccagccatcacgatccaataatgacttataatagtctgtgaaaacgttgctgtcaccagcattgttgattgcgtctttgagaccttctcctgtgaccatctcattgactttcaaccacatgtttttaacggcagacgctgccgcaacctgaccttgtgtaccgcctgcagcgtagtcatagatgatgtctacgttctgtattgcggtctgtatggacaggagaagtcgttcgatttcagctgcggttaaactgaaacgataagaacgttcagccataataatgtcctcatgataaacaagtttggagatatttatatcgtgattgaaatttacactgacggcgcttcatcgccacagactacacaagcggcgggatgggcttttgcagtcagcccaatttctggtggagttcaatggaatgtattctatggttatttgccaccaccttccacaaataatatagcggaactcttgggtgttattaatgctctgaaactcctgtggaaattttcgggttgcggtgagcgtaatatcccaaaggccaccattatttccgacagtcaatatgtcatcaatagtgccaccaaatggcggtctaaatgggaatatgagggcatgcctcccaagaatactgaattactccttgacttgttcaatatgtatgacaaagtttgttcaatttgtgaacttgaactaaaatgggtcaaaggtcatgcgggtacaatcggcaacgaaattgcggatcagtggagtgtccgggccaaagaaaatagcagtatggtcctggaaaacgaacgatttcgggttaagaaggttgtcggttcattcaatcaatttatcggtatctctgagggttagatcatgggcatgaatttcgtagacagaggggaaaacgtcaccaaatatttcactgacgaagacaatgagcgtgtcatcgcaatattacgtgactggatacccggaaggaaaaaggcgatagccgaagggaagcccctacccaagatcccgaattatgtggccgccaaagtccatatgatcatccacaaaatgagtacccgctacaactacagagattatcctttccgtgaagatatggtgagcgatgccgtcgccaatattcttcgatatttacacaccttcgacgtcagccatgtcggcaagaaagggaagatcaatttcttctcttgggtgaccatgtgtgctgatcgttcattcgcccgcaaattgaccatcgaagaagaacacacatatatcaaattgcgttcattcgaagacgcgggcggctttgcggcgttcagtgatgatccagattttcagcctcagacatttgtggacaacaccgggattacaatggattttcgtgagcgcatagggcacttcgaaaacaagaaagaatcccagcgtgaaaaggaaaggcaaaaacaagccgacctcaaagaagacgaaaagaataaaaagattccaaaaggtatacttcaatgcctccgtggaccgcaaaataatactaccgcacaggccgaagatgattcagaacaagacttcggcaaaacccaattcagccttgaagaaataatggatagccctacgctgctatccgaattatcaggagaaaagaataatggcgattgctaagatcggcgatttacacatcgggagccgtaatggctctcgttatgttcgtgacttcattaagaattatctcatcaactatttcattcctgaactcgttgatgccgacatcaaagaagtctggcaattcggtgatacatttgatgtccgcaaattcatgtatgggcgcgacaaagattggctaaaagatgagttggtcccggctctgcgtgttgctggtatcaagtggaacggtctgatcggcaaccacgacatcactctggaagaatcaaatcgcatcaactggccttcttatcttgtcgaactggcccctgatgtcttcacctattactctgaaccgacagaagttatggtagaagggaaaaaggttctggtgctgccgtggatcaacaaggagaattacaatgcatctattaaagcattacaagatacagacgccaagtactgttttgcgcatctggagttggcggggttcaaaatgtaccaatcatctgtttgtgatcacggtcagatcgacgttgcgttactttccaaatttgaccgggtcgacacggggcattttcatacccgttcgatggaaggtaacattcagtatttgggaacgccgtatcacctgacctgggaagattacaaagacggcgacaaccgtggcttctatgtggacgacctgactgatggcggtgagatgttcatccctaacaacgccagccagaccctattccgttatgtggaatatgattataccaaactttcttctgacgatgaaggtaattggatcgacccggaatggttgaacaccaagttgggtattgaaggacaaatcgttaagattatcgtaaccaatcgcgataattctaaacattacgagaagttctgtgatgccatgaagcgctgcaaatgcatcgattacaacttcattgacaagactgtgacggtttctgctgaaaaagtagaagtcaccgaggaaatgatagccaccgatgccgtagaagttctgaagaatgatatccgcgctgctgacaatatccagcgcccggaatcggtctgtaaactggccgaagcattctatacagccgcccaacaacgtctcaacactctggatgcgtaacgatgactgatatccttgaaaaattcggcaacctgttaaaggaagctacaaccccggaagatatcccggttccatttgatgttcgtggtgatgtcacccacaaactcactttccgcaaaggccgcgccaaaaacttccgctctgtgggcaatgagttcatggagatcgactatcagcgtaacccggcaaccctcgttacatcagatgataatggcgctggtaaatccactatgctggtctggctgttattctttgtcctgtacaacgatacttacagcaagaaagagaagaaggccgggctggtaaactctcagaacaaaaaagactgtgtgggtgaagtggaattcgcctgccggggtagtgaatggaaagtccgccgtgggatcaagcctgactttgttgaagttcatcaactggttgatggtgaatggaaacaggttgtgaacgaagcggctaaagccgacatgaacaaatatatcgtcaacctgatcggcattgaccagaagatgtttgagaactccctggttctgggcaaagagaaattcattccgttcacagaaatgtatactgccgaccgccgtaccatggtggaagcaatatgggatctcggattcttcagcctgatgaacgaggacgttaaggcaaagatcaaggtgctcaacaaaacgctggaagatatcttccagcgttttggtatgaaaatgattgatcataccaataagaaaactcagctggcacagatcattgagtctaataatcgtatccaacaacaatctgcagaaatcctcgagcaggaacgggtccggctttctaatctggatgcggatatttcttcgtatcaagatgagatgtctcggctacaggaagtacaaatcaataccaaaaaggaaattggtgaagtagaaagccgcctgaatcaggaatcgatggaagaaatagaaaaattaaaagcccaatacgctgagaagatgaaagctgtagatgacatcgcgtcagacaaagctgaagattatgagcgtatagaattgtcttcggctgaaagggcacttaaagatattcgcgaccagggctataaggtcactgaacgtaaaaatgaggtgctgaaccagcgcaatgagaatctcaatgttctcaacgaagcgatggaaaagctgcgttatggcgaaggattcaggattaaattccaaactgaaaaagaaggatatcaggaatccattcaaaagtttcatgatatgggtacttgcccgacttgccagcaagaagtgtccgaagaagctaaatctcaggttcaatacgaaggcaatatcaaaatcaaggatgtagattctcgtattgaacggctggaaaccatgctggaagaaatcaatgccaccatagcagagcacaaagcgaaagatgatgaatttgttcgccagatcgctgaaatcgatgctgagttaagttctctgcgggaccaagcgacagaagcacagaacggcattgaaacgattaaacgagatattcaggagttctacaaaactgctgaaattgagaagacctctctagatcgtgagcttaaatctcaaatcatgtctagccgccaggcgctcaacaccagatttgaagatattacggcatcattacaacaaacgttagagacagcctctcgggggatgcaaaccgtcaagggtaagattggcgagctgaaagaccgtcgtgctcctctcgttgcctcgattgccgatttggagcgtaaactgtccgtacagccgactccaaccgctgacctggaagcagtcattgcaggtattgaacaatctctgaaagatctggaagaacggcgccaaacaacagatgaagaacttcaggatcataatcatcttctccacttcttgaaggatgaccagaccaaggcccgcattatctccttgtacctgccgttcttgaacaagaagatcaacgaatatctggagggcatgaatatgttcctggatattgtggtggatgatacttttgatatcaccatgggcacagccgggcgtaaaggccagagcctgttcagcttatcatcaggccagcgcgttcgtgttaacatcgctattaccatggctctgcgtgacgttgctaacctgaaagcgtctgtccaatgcaacatattggtatttgatgaagtgctggagaacctgtctgagcgtggcgtacaggaatgcgtggagatgctgaagtacaaattcagcaacaacaacctgtttgtcatcagtcagcgtgagcaggaattccaagagtatttccaacacaatatccgttatggtctgcgtaatggtatgacccaggtgattagcaaggagtgatcatgaaagtcgtagttgctatcacattttatctttccatgggtattataggcatcgtatcaggttataacataccaaatatgataggactggtatcaagtatatcagcagggatatttttgattggtactggagtttaccttcttatcagaacatgtaaagagaacaaatgaaagtcgtccatttcaagaaggagccatatgacgtctacatcgggcgacccggtaaatggggtaatccttttgaagtcaaagatcatgggcgcggtaattgcatcggattatttgaagatgatctttatcgccgcttgataaatggtgacatcacagaagatgaactccttgaactggacgggaaggttttagggtgttggtgtaagccgcgcccttgccacggcgatgtttatgtcaaagtggtcaaccgtattaaactattccgattgatgggtaaatcctttgtagagcacttgagacaaacatatgggaaataacatagacgaaatattcgaggcatccaagatcgcatgtgacacctggaatagcaagaacccaaagttccctgtggccattggtgttatttcataccatcttgaaggatatgtaatatatgtagacggtaagattaatttctatcgtgatggtcacgaatttaacggattattcaaggtcgggaattataaaacttcattcgatgaccctatggaactggtctatgcctggttagaatgcatcgaagaatgttataacgccaaatttgaataatgataaagggcgctaattatctggtgccctttatcttttaaccctgtcaggaggctcaatcgagctgcaagtcgacaaaacaaataaggaacgccatcatgacgatgacaacgttgaaggccatggctgctttcgtgacctttaccattgccagcgggagtgtgcacgcttcccaaaatacatcacaatgtgactatgatttttctgagcaacaactatccaccatggcgactgcttaccacgtaggcaagtcccaatctcttggttacaccctggcagcaatatcctggagagaatcccgtgcgggtgaagacgtcgtgtctatgcggtctggtatcaaaaccgccaatatgggagcattccaaaacaaagtccaaagtgttggggaccgggaaggatgtaagaacagaaagtgctatgccaatgtagctgtgaaacttttgattgatcaggagtatgctgccaacgccgcgctggatgagatgaatttctggatgaaccaacataatcagaatgtacgcaagtctctttcatcgtataatgccgggcattctcgcaacagcaaatcgaattcgtatgctgccgatgtagtgaagaaggctaaatatctgcaaagatgtgtgtctttcaaaggcattcccgcgagttcgaaagttgatcctcaggtgatagccatgaacaagcgcacgatagagaaactcaagaggacgcgataatgaatatcaccccatcccaaacaggttatgagcatctcatggtattcctggctattcagggggccaaagagggcatcataacttcagaatacagcgggaccgtccgcttgatcgactacacggccagcgaagcatttatcaagaaatgtatcacagcatggaccaaatatgctgttgggacttatccggcccctccttctggggaactgttatttgtcgtgcctaccttgacggcaaccgatactgacgagatcttttccgatatgctgtctaagggatacatcacttatgacacccagcatgatatctatgagttctctgctctgaatcgtgtgttcggttatacaatcacgtcggaagcgaatatccctgattgggggatcctggcttggggcaaagacggtattggggcaacgtatgcttcgtctgatgttgggccagtccttattgatccgggtgttaccatggaacaataccttgctcagttccctcagcatggcgtgaccggtagcgacatcattatcgtataccctggctccaatgctctggaacgcctggtttcgggatgggatcctcatctgaaggcggtcgtggaaggtatccggttctacatcccagtagtaaatccatagcataaaataattcaataaaaggggcttcggcccctttacttattcaataacccaccctataattcaatacataagcagtacgacgaaacaaattgaaacgaaggaactacattatgaaaattatcctcgacgcatatatccactacggcaagaaatatctgatggcgaaagtgtacgaaggtgaaaccctggtacacgcccagacccacgaagatgcaaaactccgcgaaattctggcacgtgacttccctggtgctgaagttattgagccgactaaccaggctgaagttgacaaagagtgggaacgcgaatggagtccggctgcgttggccaccgctgaaaagaactggaataaccgtgaaaacgccaaccgtccgttccgtcgttgaggataaagatatgatcacattaaaagatttcacgaaagacgactatttttgtttcatgggtgccgagaaatttgagaatggggacttaccacgaatttactatttctctgacacggaagtggaagaatttttcgatctgatgggcattagcaacgatcaggacagcggtaattgggcttatcttctgcaccacaatgaaggatttgtccttggttggttctatggagatgaatttcctgaagtctgctggaaagcaggtgacagttccgaaagggttgaatatctgttggagaaacttgacagcgaaaccctccctctttgggcagcgtcagttgcctctgctgaacaacggttttgaattacaaggggctataatgcccctttaatttcgctaattaagggaaaccgaccgctttcttatcaggagaaccaccatgtcaacaccgaacttcttagatttcatgaaagagcgtgaccagttggacgaagcgttcaactcagctccttatgaactcaccatgggcaagaaaaatgccggggacgttttcttcactttcatcgacgaagacgataaagaataccgcatccagttttataccccgcaaggtctgggcaaaaacgtccgccaggtcttcatcggtcagaaacgtggttcagtttatcctgatgccatcgcacgttttaagaacccgatgcgcgttattgcatccatgatcgaagctaccaagcaattcatggcgaccccgctgggcaagaccattgatggttacgccgtgaacttctctaagaaagcgttggatcgtggtatgaccctgatcccgaaaatcatccgtcaatctggcctgaaacaaaaactgaacgtcatggatctgacctacgcgcctgtccctgaccgtggttatgtttggctggttcgtaagggtaaagatccagctcaggtcttcgacggtccgaagatgcagggtatcacctgggatgatccagacaaggttggtgacgttccggttcagaacaacactcccgatgttgggactggctccggctccaacaccgagattgaagtaaaccgcgaatggtataacagttctgacactggtcttcaactgaaaaatggtcgtgatccaattcgcggaaattacgtgcagctggtcagcggctcacgtgaagtggcaaagttctttgggtatgatttcgacaaatatccggacggcgctgaagtggcatggagcatgaagcgaggattcactaaccaggatctggtcggcgctgtcatgacaaaacaaaataaaggcatctatgatcagtatgtgttcaagaaaggcagtcaagtagttttgactgttgatgtggacaaagcagcgagtgctgcacctaccgactccaagtctcccaaattcgatatcaccccggcatcttcacctactgtgcgccgcttctccgagaagccacgtggtcagttcatcggtccagacctgaagacaactggatatacccgtgggatctactcttataagaagacagtagaattaggcggcggtaagctgataatgaccaatacggattttgatattatcacatttatcgcgtttgatgctgatggtaaaccccgtggaagcagcataggaggtttcagtgatcagagaaatgatttgaaagtatctatgatcgacagcctgcgggacgaaattggcgccaactacaactacgcctataagtcggttaaagatttcacgttcattgatataaacactgccccagacggtactgtgtacaccttgtcatccgaagtcctgaacgtccaggtatccgacaacggtgatgtgaacctcaaagttcatgtccacctgaacgtccaaccagcagcggctacccaaggcgctgatctggtcatcaccgctaacctgaaagcgccttccaacggtactttctttggtgaaacggttcacggtttctctgttgcctgggacttcaaattcccgagaggtggtaatctccaggatgccaaaatcgttaccaacgtgacatacaacttcgataagaagaaagcgaatatcacgaatatgatagtcgaggggcatcatcagcacagcagttcgtcttacgacgtaaatctggatgtcaaaacagtacagagcgtattgaacgaatattcggatcgcctgaaaataatcaaccaacagctgcgaaacttggattcaagttcgtacaatccgaacaagcggttcctgaacgacgttaccatcagcaaatccggtgagatcttgttccagggacaatcattgacacaaagccaaaatcgtcaaatagtcattaacgctctggcgaaggcacaatccaatgcagagaagaccaaaggtgacctggccaactatgcggcttcaattgaagcaagtgcaccacaggggcgcgaccttgattggcgggtatacttaaccaacaatggcaattccctgcaggttgattgggaaattacttttcgccgcaacacacacgtcggtgccatgaaggaattcagcgctcagatctaccttggcaaccgctatctggaagacgtatatgctgatgctaagagcagaggctatgcgccggaacaaccgaacctgatggcgatgtccgatgctcaacgtagcgatgacatggctatgatgaatggcgaagacgcatattcagaatatgagcagtcaatcggcggcagtctgaagattaatctgaagtaaaatggttagcccctgcgggggctaattatgaataaattcttaggagataaacccatgaagacctttctcgaattctttaccgaacaagctgcgcagcctgtgacccatgcgggtgtacagggtaaaagtgttaccatcaaaaagcaagctgacggcactcagtggtgctctggtactgttacccagatcactccggacaacgctgcagacacctataatctggaactgaccgatggtaataccatcaaagcagtgctgaccccggaccaggttcatgcagtgtctcagggccaggaagtcgtagccgttcatgacggtttcgaattcttctttggcaagtctgctgacaaaggccaggtcactgaagcatatgctcaggaactcgccaacatggataaaatgatcggtaaggcgctgggcgtcggtaaatctcgcaagagcgggcgcaccgagtttgaatattcgggcatccccggtattggtaaatccgttgccatcgacttcggcggcgaagacgatccgtatgtgatcgtcaccatgggcgggaagcaacaggacatcagcaaaggtaaaacgctggctgtcgacattgccaagtatctgggtgtcaagcctgtctaagggggttgtatgaagtctttaattgactatttgaatgaagtgagaattccaaaggtgggggattcgatgcgtgacacttctggtcgagcctcggcattcgaagccacccttgctgccgcaaggaaacaagcagcggaacgggatgccaagaccgcaaaagccatgaaggcggaattagaaaaatcaggaatagaagttggaaagattaaagataatgctatcatggtcggtgattatgccataatcttgacatctcccggtggtaacgttgaagcatcggtgaacgccaacgggaaggaaatcaaacgcctacacggcacttctgttgctgatgtttctaaacaactgcaaagcgccctttagatggtcctggtcaagctgtgattacaatcccccttaaatacagggggatttctttttctgaggatgtttaaaatggtcaatgcgagcgcatttatcaaccgtggtctgctggcgatagcacatacgcatgctctccacttcgtgactcattcatattccaaacataaggcactcggggagttctacggggacctagaggacttgctggataccttcaccgaagcatacatcggcgcgggcggcgtatacactccagggtttgagaacacgaagttgttcaacccagacccaattgcctatatccagagcatcgtgatcgatgttgacgccatttatcggcagtgcgattcacatctgcaaaatacgttagacgagatcaagactctttgctatcagacgctgtacaaactgaagcaactggcgtagtctatagacccgtctgataatataattgcccattatttgtcaaccatggataaagataaagatgggcaagatcttcgttccaactcatttagaaggctgtcagatttcagccaaatatcttcacaagcagatgaattgcggtgccgtatttgtagaaccgaatcctcataccaattctgaatcccctgatgcaatcggtttccgccccgatggttgcagtatattgattgaggtcaaagtcagccgggatgatttccgagcagatgccaaaagcctcatcgtatcaatcctgagcaggggatgggcagctatcggttttatgcatgccctgagggagtcatccgcatcgaagatctaccgccaaagtgggggttattctacttcacacctcgcaaatcattgaaggctatccatgtccctgacgtgcagatatcttccctgtattctccccagcactatctgaatatgatcgcccgccgaagcccgaatggcaatatgcctccctatctccttcattaccaaaagatggtggaagacttcggtcatgtcgtaaagaacaccgtcgctgaacacaatatcctctatggggcttggcgccagctctgtattgctcaaacccgtggtgtggcgtatactgtcaatgaggtattccagcgaccagcgatttaagaggtgtactatgtcattagcagcatacaataaagaattttcagaaatcaactatgacttcttgttcgcaagtgagcgccgatttgtacaggcaaaggagtatttggagaaccatggtatggaatccagatatgataacacattgaacatgaaagccgccatggctacagtagagcttggtgctgacagttatgaagccaaagcatattctcgtcttacgcactatgaccagaatatggtagaagaatacaaatctatccttttccggactgggtggggtaaatgaaatttcttgacgagcaattcataaattatctggcaccgcgcctggaacgtttcagctgggaacgtgtaggtgcggttgcaaagttccgttgccctctgtgtggtgactccaagaagagcacgtctaagcgccggggacacttcttctatgaccatgatgacgatgtctatcggttcaaatgccacaactgtaatgagatgagcggttgggcttttgagttctggttgaagaaatttgatgaccgtctgtacagtgagtacagcatggagaagttcaaggtcatgggtgatacccgcgcccgcccggtgcaaaagctggcacccctgaagaaactgacacaaacagcgcgtatcggtcagcaggtggcgaagcgggatgaggaccacctcggcaatatgatccggcttgatctacttgacccaacacattttgctcgccaatatgtggaaggcaggggaatgccggaaagcgctctctctttgttatatttcagtgagaactttagaaaagatcttcttaattttgaaactgacccagagaaacagaagaagattcctgatgacccgagattggttatccccttctggactcaggatggtcggatgaagattgttcaggggcgcgcatttggtgataaccttccagaagggatgttgcggtatgcaactgtcaaaccgcgaaacgaggacacgaaggtctatggcgaagaacgcattttgatgaaccgggtgaaattagtagttgaagggccgctggatagtctcttcttaccaaattgcctggcgacggcagatgctgatctattaagcgccaagggggacatctatgtgcctgacaaccaatatagaaacccgcaggtctgtgatggcatccagaaaatgattgacaaaggcgtgaaggttgttttgttcccgccagagatacattggaaggatatcaacgatatggtgaacccgagaaaggggaatatcccgatacgtgaccttctgaaaattatggccgataatgtctaccatggacttgcggcttccttacgatttgccgatttgaggaaagtgtgatggacatgaaagaacttgacaagatggatgaccaagagatcctccggggataccaacaagcccgagccgggtatgtcctcagtgggcatgagtcgaagagttttgttcacggatggcgtaatggcatagttgattccggggcgtgtcaaccggatgccgaccaaatggatacggcaagaaacttcctaaagcagctacgcgagcaaaaataattcttccctccaggcctctatctacgaggcctcgtaaaataattcaaaaatattttaaatttttattgaaaaagactttactcttcaataaagctggcctattatagttcacatagggcggtaaacaacaccccgccgaatgaaaagtgaaaagcaccaactacataatgaggatttatcatgaaaactatcaaaaccatcatcaccaacggctctgtatctttcgaactgaacaccgaagtttccaaagcagaaatgttccgcattgcacaggaagctggtttccagggcggtaagacctccttcatgaacctgctgagcggcaaaactgaagtcgcttgcggcttcaccatgaaagaccagattgtggttgaccaggcggtagtgactaaatcctctgacaaagtcagcatgctgaaaatgttcggcctgaacatccacatcgtggaagcgaagaccgaaacctatggcaccctgaacgtcggcaaaggccgcgtacagctgaacccgctgaacaacggaacctactcggtgatggtattcccgaagaaaggttacgataacacagatatcctgaacgcggtcggcggtgattctaaatcccagtatgtcaaaatgggcaaaatgactctgatcgaagtacagaacatgatcgagcgcctggcgtaaaccgcgacgggggaggaaactcccctccataaatttggtggaggtcatgatgactgcttatgagatgtgtatcaacaatattgcgcttcagattcacaaactgaaaccgtcggaaattaatccagatattccgaatgcatttgactattcaactggtatttctgctggattctgtaaagatccgaaagaagtcgtgtgtgacatagccgtggcagtcggcaaacttgggaagaaaacagatgagtaatgaagtccagctgtccgaaggcgccaaatggctcgtcaagcggatcccgaataagaactttgaggcgttccaggctgaattggtcgccgtatttgagaagtacggctatgacgaggaactgcgtttagcgtacaacgaagacaagcctctggtcgtccggcgctgataaagcccaaccctcattcactttcactttaaatacctctgcaaacattgcggaggtattttcttatggccattttaaagattggcagcaaaggtctggaagttaaaaatcttcagaccagtctcaacaaaatcgggttcaatctggttgccgatggcatctttggtaaagcgactgacaacgccgtcagagcagttcaggcaggtgccggactggtcgttgatggtattgctggccctaagaccatgtatgctattcgtaacgcaggggagtctcatcaggatcatctgactgaggccgacttgattgatgctgctcgtgaattgtcggttgatcttgccagcatcaaggcggtcaaccaagttgaatcgcgcggtactggcttcaccaagtctggaaagattaagacattgtttgaacgccacatcatgtacaaaaagctgaatgccaagttcggtcaggcgaaagccaatgccctggcccagctttacccgacgttggttaacgccaaggccgggggatacacaggcggtgacgcggaattagaacggctccatggtgcaatagccatcgataaagattgcgcatatgagagtgcatcttacgggcttttccagatcatggggttcaactgcgttatttgcggatacgccaatgccgaggagatgttcaacgacttcctcactggcgaacgtgctcaactgatggcatttgtcaagttcatcaaggctgacgccaatatgtggaaagcactgaagaacaaagattgggctgagtttgcccggcgctataacggcccggcgtatgctcagaaccagtacgacaccaagctggcagcagcatacaaatcgttcagctaattcaaaggccggaaacggcctttttctttatgtatgatagagttatgctgggcgcgtcgcttaattaaaacgatgagataacccctgtagaaataggaaggttcacatgcaatctgcgagcaaagtagtatccatgaagccagctggtaaaaccaaatcagcgcgcaagaaagaagtaacccagcgcgaagacgaatggatgaagttctctaaaggtgatttcaaaatcgctccattccatggcctctctgacaaccagaatcttgcctaccaatctgcccttgaaaacaatctgaccatcacaatcggacctgctggtacgggcaaatcatattgcggtgctgccgctgctatcaaacatcttattgatcgccgggtcagtaaaatcatcatctctcgttcgccgttgccaaccggacagactgcggggttccgccccggcgacacgtatgaaaaactcgttccgtatctgcgcccgctgatcgaaaccttcaagaaagtgttgaagaccgatactggcagcgacggcttcttcaactatctgtgggagaagcacatcatcgaaattcaggatctggagacgatcaagggtatgacctttgacgatgccttcctgattatcgaagaggctcaagaatgcgacatggagcagctgaagaacctcctcacccgatcttctgactcgacttacgttttcgtcaacggtgacatcaagcaatcgaacaaacgcctgcgtgatagcgcccttgacacgtatgtcaaagcattccgtgatttcaaccagaaactggaagcgggtactctggctgttcacggtgtagagccgggtgatgtgtatcctgattgggttcaacctttcagcatcatcgagttcaacaaagatgatcgtaatggtcgcggcaatttcactcgtctgatgcttgaggtcaatgacctgtacgacatttaaatacctcatcaccattccccgccgccttcaatctgcgagggcggcgtataataacaacctgcatataacacaaaccgaggatcgctatgattaacgtcataaagcgggacggatcttctgtctcctttgatattgaaaaactacacaccgtcgttgaacgcgcttgtgatgggctggacggggtatcaatgtcagaggtgatagcagcatcgaagatccaattcaccgataatatgagaaccgaccgtatccaggatattcttatccaggcggctgcgtctctcatctctgtagaaaagccgaactaccagtatgtcgcagcgcgtctgaagtcatacgacctccacaaaatcgtttatggccagtacaagccgccccacctgctggatatctttgtcaagaacatcaaactcggtaaatacgaccgagaattcctggatctgtactccactgaagagtttgatgaacttcagaccaccatcaaccacaaacgcgataagaacttcacctgggcggccatgggccagctgactgagaagtacctgttgcgtgaccgttctcaaaaagacaagaaagtctattgtgaaacccctcaggtcatgtatatggcgattgctatggcgctgttctctaattgggacaaggccaaccgcctggatatgatcaaaaagttctacaattatgccagcacaggcaaattcagtcttccgacccccatcatggcaggcgttcgtactcctacccgtcagttcagttcatgcgttctgatcaaaactggcgacacgctggattccatcaacgcgacagccaaatctatcgtagactatgtgagcaagcgtgctggcatcggatttgacgttggtgcaattcgcggtatcggcagtcctatccggggcggggagatggtccacactggtctggtgccattcatcaaatatctgaccggggcactgaagtcgtgctctcagggcggtattcgcggtggtgctgctacggcttatatcccgctgtggcattaccagttcgacgatgtcgttgtgttgaagaacaaccgtggtacggaagaaaaccgcgagcgccgtatcgactatggtattcagatcaaccgcgtcatgtttgaacgtctggtcaacaaacaacctctgtatttgttcgatccgaaagacaacatggatatgtacgaggcatatttcagcgacgtggatcaattccgtactctgtacgaaaacatgatcaaagcagcagacgccgggttatgtcgagccaagacactccaggctgaagaagtattccagatgttgctggatcagcgttccgataccgggcgcatttacatcgcattcgttgatcacatgaacatgtatagcccgttcaacctcgacacgatttacagctcgaatttatgtctggaaatcgcgctgccgactcgtgaattccaacaatacgatgatgaaagtggtcgtatcgctctgtgtactctggcatcattcaacctgacggcgtttgatgagccgacggaaatggaagatgtggcattcgtattagtgtccgcgctggacatgctcctcgaataccaagattacccggcccgccaagcccgcctggctgttcaggaatatcgtcccctgggtatcggtgttgtcaacgtcgctcacttcctggcgcggaacttcaccggatatggttcgcccgccgggttacagttgatcgatgaatggatggcgcatcttcactattatctggtcaaggcatctaacaagctggcggaaatgtttggcccgtgtggtaaagaaacaatccattcaagcggtatggtaacagctgacctggcccctctgcctctagacctccttcctaatggcaaaaagcctgttggggacgcatacggtctggattgggatgggttaaaaaatagactcgccaaatttggtatccgcaatgctaccctgttggcgatagcccctactgaaagctcctcgcaggtgctgaatgctaccaatgggattgagccgccgaaaggcttggtgagcattaaggcaagcaaggacggcatctacaagcaaatcgtaccggatgtcgaaacccttgggcctatctatgatctcaagtggaacatggaatgtatcgactatctgaagacggcggcggtgttccagcgctgggttgaccaatctatcagtaccaataccttctatgatcccgagaagttcccgggaggcaagatcccccgcgccaagatgatgcaggatatcttatccttctatatgtggggtggcaagactctgtactacaacacaaacaaagactccaaggaagacgaggagctgaaagcagctgaagaagtttgtgatacctgtgtagtatgagttaggtctatatctcactgtgttatattatcaggggtggagcaattcaccccattatccatcaggaaagaattatgtctgaacaaaagcaattttccgttttcgacccgacatcgaataaccagggactcccgttctttggtgatccggtatcaatccagcgttatgacgttgttgcttggccgtttgtacagaagtggtatgaaaaaggcctcagccaattttggcgcccagaagaagtagacatcaccaaagacaaggcggattttgccactctaagcgatggtgaaaagcatatctatttctccaacctgaaacggcagaccatgctggactctatccagggcgcggccccgtttgaagcattcggtgcctgggcttctaccccggaggcgcagttcgctatcctggaatggacccgccaagaggcaattcactctctgtcctacacccatatcctacgcaacacggtcaatgatcccggcatcgtgtttgaccatgtgctggacgtagctgaaattgttgattgtgcacatcaaatcagcacctgctacgatgaatctgtgcgctgggcgggtatgcgtatggcgggccggatcttcacccgtgaagatatcatgaatgccaagcggtcattctggcgatccctgtttgctgccaacacgctggaaggcatccgcttctacgtttcctttgcatgctcctgggcattcgtccaattccttcaaaagatggaaggtaatgcgaagatcattcgccagatcgcccgcgacgagcaggaccacctgatcctcactcagacattcctgaatcgtcttccgttgatggatccggactttgctgtcattcgtgaagaacttcgtgctgagatgacacagatgtttatggatgtcgtgaatcaggaaaaacagtgggctgactatctgttcaaagaaggttctatcctgggcctgaacgccaagatccttcatcagatggttgactggctggcgacccaccgcatgggtgctatcggccatccgtatcctggggaaccgcgcaaagacaatccggtgccgtggattaacgactggctagataatactacaatgcaatacgcattgcaggaagcagaagctcctgattatctgatgggcatactgactggctcagtatctgacggtcttaaatttgcataaaggtgagaaatgattacgatctattccaaacaaggttgtgcacagtgtgttacagctgagaacatctgtcgcattcgcggtattgagcatcgtatcctcaaacttgaaaaggactacaagttggaagatctgcaagctctgacgggcaaacaacgcatgtcaatgcctgttatcgttctcgctgaccagactgtgaccgacgttgctggtctcgccgcaagcgttaaacgctgatcatatcaagcccccttccgggggctttaatttatggtgaatatatcatgtcaaaacaattattgcctcatcaagaacgggttgtccaagaaaaggaagaactggaaaagaaatacaatgcgttgggcgcatttcgtgaaggtgatacattcaaatccctttcgaccaatgaacaattttggttgaattcccaacattatgtgatgggtttgtatttgcatgtgttaaacgaacgcatcaaccgtttctaatttgaatgaagcccccattctgggggctttacttttgaaaaagccagacctatacttcctatacaacacaaatattgaacagcaggaactatatcatgtctaacatcatcttacgcaatcccggtcatcattttggatacatccaactcccgttggtcatcgacactttataccctgaagacaaagaacagatttgttggtctccagcggccctcattgaacgagagatattcaaatcagaagtggatgtcatgtaccggtttggggaaacgggcaaattgcaatatatgggcaaggccaccgagttgcgaaccaccagagaacaaagatttcttcgtattgatacgacaaattgcgaattctttgttcttctgaaggaatatgtgacacggaatcgcccggtttcccagcaccgcccgttcttgtcaagtgtgcatattgacaactttatctctgacgttcaccttgtggcttctactcttcacgatgaagaaactggtgtaccaaaggacacagtcttaaatatggttgtgatcacattagtggagtaagccgctatgagcgatttagtcttgaatacccaattccgtcttcctgtggattctcttgttccgtttcaaatcatgaaacagatgcttgaagaaggcatggaagttccgttaaaacataatggacaagatatcgggcgctgtatgagttgctcatttcaggatgatgcgtattgggcaatggactataatgctcaaatgccaattgaggctaacacactcatggaattgggtttcattttcaaattaaaaccaccaattcggttatacgatatcaagcctgtggtaatacagatacctgctggcaaatcaaattacatgtacttgatatcgcattttatgttttatgacgttgcgccgtcagttggtccgttgtaaccagatggtgtcagtaatcggttcaggatcattcacgacgttaaacgtaatggtgactgccagggaatggtagtcatcagacagagatacttcgacagactgtatttctgccctcggttcataaagagcaatagcgtcttcaactttgttcttcacatctacctgaatagttggcgtcgtgttttccccgagcatcccataaaggccagcgcccatatctgggagagtccgccattcgcctgcagacgacataacaatattccggacagactgtaacacagcccattttccagatttcatcgtgacgtctttggtaacaggatgcatcccaaattttaggtccacatctttataatctttcatgtttaggctccctcagcagcacggagaggcagtatccgcctctcctggtgtaatcgtatggggttattggctggaaccaaaattaccgccattgtcttccagttccggtttgatatcgatagtgcccggccctgtcggtgacgctggggttgcaccactaagagaactggcccggcccgcgccttcggcatatttgatgttgccatcaatagtttgggctaccgtcaatttatcagcgatgatctcggacacgaggatcttaggaaccttcaacgtacctgacacttctaacatctgacaaacgatacggaaaatattctgcgcctggatttcggcaagctgagaatatttcatcaaagatgtcccggcaaccacgtgtgaatgattgctggaatgaagatgataaacttcgcctgtcttgcgctgaacttccgtcccaccaacggtcaggttatggtcgcgaccgacataatatcttttgtcgaacatcgcaatatcatagtggtcttttactgatttattgaccacgtcaccattcggtaacatttgtttataggaacccgattggtgcatccagtggagacgctcaccaccaggcgtatcgtctacttccataatgtgaccagaacgggaagccataacattgttgtatggatacaccgaaccgccagcagatggaactatggtttcacctgtgttatcaatatcctgtacccgaccagatggcggcggggtctcttgtacttttggggtgcgatcaggaataggttcagaccatttgctgttttgctgtgctggagcagccgccttcgtgttcgccgggccgggccaacgataacccaaaaccgaagaacgactgaaacggctgaccttcacgctgtcagattggttgcccccaaggcaccacacataattcgcatcaaacttctgaacaaacgcgacatgaccaaaagtcgggttgttcccccggcggaatacgaccactgccccatatcttggttcagacaacggagaaccccattgaagatatgaacgggccaaagcagatcgcgtagatgtgaatccagcctggaggagaacccaaccaacgaatgcagcacaccaactcacttcgtcttcagatgctccaagagaagtggttttgtgatattctacaatccttgggttgttgttgaatttaccagcatattccttcacacccaattcgcctcgagcgacagtcatccatttttcaggatcatacccatctttgggcggctctgggtcaggttgaggttcgtcttctatttttacaggaacatctgtaacagcattatatttttgacgttcaatagactgcacaacctggccgagagccaacgggttggtgtcagaaccattaacctggttggctgctggccatacccacgctattctcaaattctggtatgcttcgtcaagggcgaaccccatgacttcactgttgacagtaataccagtcggagaccagcctaaacctgccgaggacgcatttgttgcaggcatcatgagcacagcccatggtaacagctcagtaggcaggagagtagtgtcttgggtgtgtacgccgtatacacggacggcaacgcgcccgttttcttcgggatcattcacgtcttcaacgcgcccataaaaccaacgcatattttctaacatagtgatgtccaaatgtgtagaggatgttgaagatatttatgctctgtcgaatataatattataggatgcgtcagcatccgttgtatttgatttatttgtttcaactcgctttgctcgtgaaagaccgtcttacgcagacagcgcccttccaatgccagggaggcataggcgaggaaacaaccatacagcacagaatgtccgtagaaaaacgatttttattccatcctaaacattcaatagcttagaagccaggagtttgttcaggaacaatgacattataagaaattgcgttcaagaaacaacaaatagacctgtaaaacaaataagcaataaaaaaaccccgctcatgcggggttttggttctttttagcaagacgagctttcaatgtctctgtaagcatatcaagatgccagggcattaattcgcttatttcaaatatgctatagccttgtgacttcaattcgtcacacatcacgaagtaggataataaatcaatttcaaaaattaaatgaaaatctcttcaagactattaaattcgatcttatgctctttaccgcaaccaggacacttaatcttggtttcaaaatggatgcgcggtattttggaaaagaaatcgtctttaattttctggataatatccgtttccaggttatcaccaacccattgtacaaactcatcacgagttttcttacgagcaactgctacctgaggatcaatacccggttcattaggatcatcaaaccgccaaacctgaccgtcatcgtcatacaaacaatcgatgaatgtagcaatgctctcttcgatagaaaccactttctgaagcactccagcatcagagaaggatggttgacgcatcttgatgtgatagccacccggcaggtcgaagcattctgtaaacccctcgacgccccgcgccgccaccttgtccagggggataggcacaacgagttcttgaccgcatgcttctaaattgtccccaggataatcaggatcaaccgaaggaactttgatctggttgttgcatttgtaccggattttcattacttcaccgattgatatacaacgcatccgaaggaaaacttcttctacaacaccgatcgggagtttggcaaatggaactccagcatctacacaagacgaaaataatgattccatcgttgcgatacgttcatcatcaggagtgtttgggtcagccacctgaagtaaagaagtttgttgccccgcagtaaacgcgcgatacttgatgacagtaggccaaaattggcttttgagcgttctttctgtacgaggcaatgatggtaaattcataatgtatctccacggtatattgtacagatatttatagtgaggaacgaaaatgcatggtttctgttttagccagatcggagagcaattgacaatacttcatcctgatgctggtactgatttctatttattcctgtcggattatgcgagacatttgggtgtagacaccatcgcaatgtctaaagatgacatgaaatttggtaaactggggacaaaagatttattgagatatggattcaatgtcattgtcgtagatcctgtctatagtcctattcaggatgaagacgttatacccgtgggtgtacacaggaatattgaaacattacacaaatattatcccgattgcattgtgatcggggagatcattccgtattttcataagagaagacgccttcaaacgattaaaagttattttcaagaaggccaagcgtccgttattatggatgtcctcacaagcggttgggttgttaaaagtacgactggtaatagtcaacagatcaattcccgtgtatatgaatatgtgaaagaacgagactacgaactggagaatagtaatgcaaaacgaaaaacgcgccgatcttgagcagttgaaaacagttatcatcaatcgcctaaaggccgtcgtcaccaacgataaaggtgaagtcgcaccagggtttgaaggtattttcgatgaattccaaaccgacgacatgggtaatccggtcatccaaaccgtcgccgggatgatcatgatcgataaagaaatcctggaaagcggttctgttcgttattcgccgaacatgggcgttgaagccgaatccctctgttctgaagtgatggacattaacgaagcgatcagtgaaatcgggtacaaactgcttatctgtaccggccattatgtggatcctcagggacagatcgcttatggcgatgaagcgcgtaaagtgaaacgacacgttgaaaccagcgttctgctgaacaccatccgtgagatgcagaaagagcaggaaagcatcaagccgcgtctgatcctgccggatagcaaaatcgtcacccgataaatcggtctaaatacccataacaccaatgaaactatgttatgggtatttttatgaaatattgcggaattgactactcttatggttgcccagcgatttgtgtctgggacgacaaagatcctttggaatttaattcccttcgcttctatgcatattacacggtagaaaaatattgtcgccctattcgaccgaacatcagcattatgaagcaacctgcatattcctcccctgaagaaagattctataacatttccaaatgggcagaagctgttcttcttacagagaaacctgatttcataaccctcgaaggttatgcgatgggcaactctaagaactctaacaacatatgccaaacagctgagaacacttctcttttgaagcaagcaatgcgccgtaataatatggaattcgaaatcatcactccttcttataccaaaaagaatttcacaggtaagggcactgctgacaaacttgctatgatagcccacttcgagaagctgttcaacgttaacatgcgcggtataatggatatgttggaagttaaagatccgaaaccaatcgatgatcttgtcgatgggtttgccaatatggtaggcggttctgctttcaaagagaatcatcccgaatttaattctgaggtgcacaatggttgattattggttattggcgaatattatcacgttcgcattattgatggcgacggcgttcgtttggttaaaggcgatgctgacattcttgtcttcgttggcgatgcaaatatcgtattattctgtgacaccacatgaagaccagaatattcgggctgcacaacagagcgaatatctgtccaaatatgttcatttacgcgaacgctcggtcacaatcgttttgttttccacaatgctgtttgcggttatcttatttgtacgatatgtaatggaggccatccatgccgttctatgattatgcatgcaaaggatgtggtcattctttcagccagcgcaagacctgtgctgagcgccatactcctgaacttgatccctgcagcgaatgtggtggtcagatttctatggtaattggcgctccaaaaatcgtttccggtgtccgtggtcctcaatctgctccggacgggttcaaagatgttcttcggcagatcaagaagacatcgggtaaggggaacacaatcgatgtctgacggacaaatcgctcaggtgttgacgcctgattcattttcagagatggtattgatgcgcgcgcagaccaccagggaaagcctcctggaaacaatggccagcgtgtgcgaagagtatgatatcgaggaatctaagattcgcaagatgattacaccgcctctgttatcccgtttaacagctgagtgcgctgacgctcgtttgttgaaaggtgaactgaaatccaagaaaattttataggttgttaaaatgactaaagaacaagtctacaaattgattaaggcccaaggcttcttgcctggtgttacccgctggcgtgtgggtagtcttaacgagcacgaagaccaaactgaccggatcaaattcacgactccggaaggtggtgtgtatgtcgtggaataccacactcacaccgatgccaaacgcactttgtctgacgtgttcgatattattgagattaacccgaaagaacaattacttcgcggttaaatcaatcaaatatgcgggggtataattactcccgctgtgaaagaaataatgtgtacagaatagccccctggggcgatactatcgaggaaagaaagaatgtctagcttatttgatcgtctgaagcaatcccgtggtcagcaatctgacgctctgcaaaaacgtctggaacaacagggccagcgttcggctgcagcaaaggatccgcgtatctggaaatggacctggaacaaggaaggtatttccgaaaacatcatccgttttctccctatcccgctagtagatctgaaagcacaggaagaaggcaagatcgatgctgagcagattcttactccggttgcgatgatcatgcgtcattccttccaaggtaagggcggctggtacatcgaaaactctcctcagaccttcggccacgaagatccggtgcgtgatcatgatcgtccgctgtgggcgcaacaaaaagagaccaacgacgaaaaactgaaagaagttctcaaaggtcgtctcccgaacaccaagtattatgccaacattctggtgatcaaggatgttaactccccagaaaacaacggcaaagtattcctgctggaattcggcccggcgattaagaaatttttagacgcggcccagaacccgaaattcgctactgacccgaaatttgatccgtttgatatgtggggcggcgccaacctgattcttaacctggttggtgagaaacgcaaattcggaaattgggaaggtctcgtcccactaatggataacgtgaaatgggatgcggtttcttccctgggcggcgaaggtgaagaaggcgataagtacaaagaagacatctgggaaaaagaacacagcctgtttgagttcttcaacccggccaacttcaaatcgtacgaagagctggaaaaacgtctgcgcaaagccctggctattccggatggccaacccctggtggaaagtggtgcatcaactgttgccacggctccggtacatcaggaaccgcaacgacagacagcccaggatagcctgaaccagcagcaatctcagccgtcgcaggcacagcagagcgttcagactccttcgtctgccggtgctgatgccaagcacacttcgtctctggatgagtttgagcaattcctgaaacaagaataaactgccaagccccttcgggggctttttaattactgctgactctcttcaacatgcccaacagactactcttttcagatgctgtcaggttgtcattaccgagaatatccctctggatgcctatagagatgcgctcaaagtcagccaggcttatccccgccagattgtttaccaattgatcgagttgcttgtaggcaagaagggcttcgcctgtgaagttaccttgctcgagcttcttataaagctgcccggcttttgacgcagcggtttcccaatctccggaagcaagagcatcagcaatacccagaggaagaaagtcgctggcgaggctgcgtgtttcatattctgtctccgataggactttgttgtatgaaaatgaaatattgtattggttaaattgatcggtggcgcctttgtcaagttcaatagacgaaaagtttacagggtgcgcttcaacaatataaaccctgtggaccacctgatcttctgtgtccaattgttcaatgcaaatatcggttacaaaatcttcgtaataacccatcttggtggtaagaggatcgaagattaaatttttccatttgtccataacagacttttcataatagtcattggccaaaaggaatgagagttccaaatcaacgtttgatttgttgttcggcattttgatgtggttgccgttgttgttcataggcgtggtgtcgataccgacgccaggcaatgatgcaaccatacacatcatttgcagagagcgagaagtttggtttgtccctccaaagaatgcgtttacgatacgcgccgtagaacgaaataaatcaccaaacgaagatgtgtctgatttgtatgcctggctatcgttggctaatgtggcattcgagtcaaagatgcctgcaggcaaagggatagtcacctggaatctgttcttccttgacagaccgcgctgcaacatctgtgtaataaaattgcgatagtcttccacgatgaggactccacttaaataatagatctgaaggtatttataggagttgacaaatggcaaagaatgcgatgggtgaagaagatccgctgctgtttccagccgaaatggatgctcccgaattggtgaagcgctacattcgtaagtaccgccagcacttcggggccgaagccaagcgtaatattcgccgctcccacgtgtggttcatggaacgtgtgtccaaggatgccaacctaaccccacaacatatgatgaaagcgtttgctgaaaacaagcgccctgtacagggtgtccgctatatgatcggacgcatgttctatttcaaatatgacgccctgacaaaagaagagttgccatactgggatatgtatcctttggtatttttcttcaatttcaccaaaggggatgggattaattttggtgagcgcggcgtgacttatctgtgggggcttaaccttcactatctcccaccaaaacttcgccttttggtgtttgaagacctgattaaactcaggaacgagagagcgtatcggtccaagactcgtttgcgtttgacgtgggaagcgctgaaacggttcgccaatcatcctttgtacgaacattgtgtcaaattatacagggctgatcggttcagaacacagctttatgaaattgaaccacaatattgggaagttgtcctctttatgcgtactgcacgcttccaaaaacaaagtcaggccagcgtctggaaagatgcccgcatgcgtcataaacccaaaaagtgattagttctataacccgtttgcagcgataattcgcgaacgggttcccttcaacaatgaggctatacaatgtctactatctatcgtattttaggtattgaatttacacctgctcgtttagatgcaacacacccactttctaaagggaagactgggtttgaaatagggcgtgaatctttctataagaaagacaaagttccgccaacttttgcttccatgatccgcgatatgggtatcgaagaagattccgaagccgaatacgatatgaaggatcttttgcgcgtaggcgatagcacaacaatagatttcgtacaggactacatcacaggctggtctcattcccgtgatttgaagaataaggcgaacgacacattgggttgtttttcctatgtcgttgactatctctgttccagaaaacaaacagttgaattcttcagagacgatttgttgtcatccctcggcgattcagatttgaagttggtggattctaaaaaccgtgaatttaacctgcgtgacgcgattgaatccaatgaagtccatgtcgtaaaagaaggaaatatctttttcggtggggttcaggaatttaagatccaccctgacatcgtatacaccgacgatgtttgccgcaccatcacgaagttttttggcaaaatcaatgattcgttgtatgttgccatcgccttgattatgcaagaagaatattttgaatctaaagttcgccaaattcgtgaacatgtgattgccgggcgcggcttcagatcgaccgacccaagtgaaatgccgaatttcttcgatcagtaaaactaccacgcctggagatgtctatgagaaggtatttgagactcaatacagtcctagaatcgttgatagaattttatatcttacaacatctccgttcaggaaacgagcacgttgacgacttcctcttgtatgatcaccagataacgatccattcagttgaagtcgttgacgacgatctgctcctggccaacatagagcacagcctgtatgacaaccaggcgggtaaatattgtgctccggcattttcccaggtagagataacgccatgctggcctgccgaaaaagttttcaatatagacgacgtggtttatgatgaggcgaactctttcagatagagagttgtgaagaaagtttgtcatctgaatattctttttatagaaaatggtttacaatcttcaaaactacagtatagttgaaaacaagcgaaacggctgtgtcagccgaccgattttacaacatataggatctacactatgtcttacattctccatattgagtccggcctgaaatttgatattgaaggtaaaactgcgtctgacgtccagaccgaaatcaaagacgctgggctgctgatcggtaacgtaaccatccgccgtatgctcgacggcgttctgcaaagcgccaacgggtttgaactgatcgattccctttcccaggaagagcaggaagaaaccctggaagcactggaccgcgcgaaggccgaagaagtccagccgactgatgccgctggcgtgaaagaaggtgaaggcgatgccactccggtggttgacgctgaagaaaccgttgacccgcaggaagtagaagctgtggccaacgcagaagaagttcgtcgtcgtatcctgggtaccaacgtcgccgaagcgctgtccgaaggtagcaatgctgccgaagacgcttctctggctgcgaaatccaagctgactaacctgaccccggcggttgcaacggaagaccgcaaacgtcgccataacaaacgtgaagaaatggttgaagctgcacgttcttccaatttcggcgcgattctggctgcagtagaagcaggcgtcgtcccaggcgtttacctgagctatgtcaacccggatatgcgctggttccaattcccggtcactgacctggctgataaagaaaacccgcatgcgcggactaacacctacgtcgatctggcgccgatcacttccggcggctggggtttcagtctgtacgtgaaaggtaaatctttcaccaaacgacagaaaatcaaagagaccgatgcggaatctctggttaaagcaatcaacgaatggttgccgggcgttctggaagaagccaaaaacgcaggctgattttaaatcagattacgttcaatagatgaaggggctgctataatagcagcctcttttgtttattggggctttgtatgtcttatacaatcaaaggtctcttaaaaaggcctgttcatttgttccataaaccgcctgccgttgtcggggaatatccggcaagaggagagctttattatgttaaaggctccaatggtagtggaaagtctaccgttccgtcctggatggcggagaatgatcctcaggcatatgtcgtgacctataatggcaaggtaatgctgacagtttgcccatcctttaatatcatctgtgttggtaagtatgacaaatcgaaatccaaaggagttgactccctaaaggataccgaacagatgttattcgctgtgtcaattactgagcagcctgaatatatcgggtatgatgtgatctttgaaggtattatccccgccaccttactcaatacgtgggtcgaacgtctaaaccgcccgagccgccgtctcgtggttctgttcttggatacccccaaggaagtatgcctggcgcgtgtgagttcacgcaacggtggtgaagatttcaaacacgatctcgtcctggagaaatggaagcgtgtgaactctcaccgagagcggcataaagagttgttccctaacattcctgcaggtatgatgaagtctaatggcctgacagttgatcaggctgtctctgcgtttctcaatcgtgattttgggagtattgattgatggaaatctttgctttaaacaacaacgacatgctgaagaaagctgtcctggctatccgtgaacacgggattgaatccgatcccggtaatgcggagattaatacagacggcacccggttccttgatggtgtatccataaccgtatcagatatccgtgaccgctggctttctgttgaaggtcgcaattcatctgcgctggctgctatcggtgagaccttctgggttctttcaggccgcaatgacatccgtttcctttcacgagtactcccccgcgcggctaacttttccgacgatggtgtaacctggcgcggcgcgtatggcccgcgtctgtacaatcacgggcaactggatagtgttatcagccgtctgcgcaagaatccaaacacccgtcaggcatatctgaccatctatgacccggcgctggactcggatgaggggttggctgctcataatgaaacaggcgaagccaagactaaggatatgatctgtaatctggctctcctgttctctattacggatggtcgtttgaacatgactgtcatcaaccgcagccaggacgttctatggggtatgagttcaattaattttattgagttctctattctccaggaagtgctggccaatgttctgaaagttgatgtcgggcaatacaaattgttctctaacaatcttcattactataacaatgaagtaagccaaaaacagctgagtaagatcacggcggataccgtcgtggtggaagaaggaatgttcaaagacaagatcattttcagtaatgaaattgttgaagaacagaacggaatcttgtatatgttccgtgatgtgttggaagcgtgtgaaagtggattatcctggccttctgtattggggatgttggaacgctatggcgcggacaggggattattaatgcaaatggcgtattgtttgtggtgccgtttaaatggtcatcctatcaatcatatgtatattgccgatgatgggttactgaatgctctccgtcattctccaattgatcgcaaatatatgaatcctcgttctttgggtggtgacaaatgatgtatcctaatctggaatttttcacggggcgcaagcgctccggtaaagacttctgccttgaatctttgattagctttaatgaaattcagggtgaaactgaaatccgtcggctttctttctccgacgaactgcgccgggtagccaattacatctacccctggttgccagtggacgtagacgacgctatcaaggacgttccgtttgttcacccagataaccatcatgggttaaccccaaggcagatctggctccatctcggtggcgctactggcttgcgttatgtgcagcctgatttattcctggcgttttttaagcgttaccaattgccccttgtcgaggccaacccacacatccattatattgtgagcgatctgcgcaccccccaggaatatgaatgggcgctgagcactaaatgccctatcacgcgcatttcaaaggcagaccgcgccggtatcatagaggatgatatagaggctttcattgatgagatgaaggtcaactacgaatttgtcaatccgtttgatgggtgggcaccatttgtcaaattctataaggaaaggaaatgataacagcagatcatattaaaaatctgctccaactccaggaggccactaatgtggcctattttggggaagagtgggaaaagtattggactcatgttgccgtaacgaactcaatttatcgtgaatgggctgagtttttagatgaaaccacccaggattggaagatttatgggaacggcatccatttcaatagaacggatgccgtctacgagttggttgatgtggtccattttatgctgtcctctattttgtcagggtatggctccgcgtttccgttagaaatgcaaatcgatcttttcttaaaggaaggcgtgttaataaaagaatcgggtaatctggcatctgtcacagaacggttcacgtcgtttatggggcaacccgatatcatccggtttgttcggttcttggcgtgcgcctgtggttatctggggctagacgccgagacctacatgttggcacacaaacgcaaaaacgatcgtaatcggctgcgcgcggcgggcggtgctgactatgacaaatccaaagaaacccctctgaccctggagttctaatgtttacgattaacatctccatttcagccgataatcttgagtcatcggttagcaattttatagagtacatgaagcctttcggccatttgatattcaactgcaagttagacgttgaaggcggggttgcggagatgttattcacgacaccttccccaacagaagcattcgttttaattgagcgtttgacttctgaagacattcctgtcccagagccattgcaggacatctatttcagcgagacgatttattcgttgcataccatacccccggacgtgagccaggaggatatcgtccgccttattaaccacaatattaactttggttgtattgtccggcgcgataactatcgtttgcgcaaccatatgctgaatatgaacgcgccggaagtgccggatatttccccgcgatcactgcgttctatccaggaagcaataaacattttatctaacaaggttctgggtacagaattattaaccatgattaacaaacaagaggaagtaaaatggccagttcattaatggatcgtatgctgaaagttgccaagaagcatgacgatcaggcttcggtattatcccagtcagatgcgctggaaccgacggtcatctgctcaactggtattcccctgattgacatcgcctggtctgggcgtgttgatggtggccttatctccggcatcaaaatgatggtcggtgattcccgtacattcaaaacaatgttcggcctggtggacgtcaaagcgtacatggataaattcccggacgcgatctgcgtattcgccgattctgaaaaaggcgccaacgcggactactggacatccatgggtattgacatggatcgcgtcctgtatgttccgatcgataacgttgaacagaccaagatccgcctgttacagatccttcaggaagtgaagaaaggcgataaagtgattgtgttcatcgactctatcagccagttaccttccaccaaagaagtagaagacgccatcgctggtaaagacacccaggacatgacccgcgcccgcgccctgaacagcttctggcgcgttattacgcctgagatcaacagcaaagatctggtgttggtctggatcaactcgtattatgatgaaatcggaaaccaatatgctgagcctaacatcaaaggcggcaagcagggattcctgtcatccaacctgatctggttcatcacccgttctcaggtgaaagaagacaaagacctgctgggatggaacttcaacatcggcatcatgaaaggtcgccatgttaaagagaaagccaaactccctgttacagttctgtatgacggtggtattgaccgttggtctggtctgctggaaatttcccgtgcgctgggatacgttgacatgccttcgtctggttggtatgtgcgtacagccaaaggcggatttgatccagaaaaagagaagaaatatcagaagcgtcaaatggatgatgatttctggtatccgcttctggaaaatccggacttcgccgatgatgttaaaaagatgttcggcgtttccaacggcactgttatgcctgctaacatgctggagcagatggaccatgttatcaacaccagtgaataacaatggagggggaggtgactcccccgttaattacgaactcatcgaccccggtgaaggccaaatatccatcgtccacattttggagggccaattccgtggtgtcaaattccgtattggaaaagtatcctgggaatggtctgatgacgcaccccggcttatttttaccacggatattttgaagaaaccttggcgtcttttctttaatgatttgaaaaataacgacttgttcactgaagtgtcgggccgtatcttattagacttaatgcagaagaacgctcaggaatacaacaaaattttggtggggtagttgccaatgttactcgaatctgtcgtgctttcccaattgatttacaatgaagaataccaaagaaagatattgccttacctgaaagccgattatttcgaaaatgaaggcgagaagattatattcggattaattgacgattattcgtcagaatataatgctcgcccttcggttgatgctctgtctattatgctggagaagactccgctcaacgagcatgtgtttgaacaatcaatagctgctctttctaatatcaatgacaatacattcaatcaggaatggttggtaaaagaaactgagcagtgggcgcgcaacaaggctgtacacaatgcgataaaaacagctgttaacatctatggtgataacaagcggcaggaggagatgaataacatccccaccatcttgcaagaagcgctgtctatcagttttgattcatatctcggtcatatctattgggaaatggctgcagagcaatatgaccatatgaattcatctgaggcgaagattccattcgcagtagagatattcaacaaagctacgcgcggcggtgtaggcaaaaagaccctgaacattgtcacgggtgccatcaacgcaggtaagaccacaaccctgatagatctggcggcgggttattcagagcaggggctgaatgttttcgtctttactctggaagttgctgagaacatttggcgccatcgtcttgatgcccgtattatgcgacgggactttgaagttgttgaaaagatgactcgcgaagagtatatcgcgactatccagaagctgaggacaagagacaacggatctttgaaaggtgatatcgtcatcaaagaatacccatcgggagcagggcatactggattgtatcgtcgggatattctggagtatatctcctccacaggtatttcacctgacgttatcattatcgactatttgggtgaatcagcatcttcgcgactaccggctcaccttatgaacaacaccaacgtgtactatacatcggttgctcgtgaattccgtgcgcttggattcgaatttgattgtccggtttggactggtatgcagttcaatcgtgaaaaacaatcagccacagacggggatatcagtgacctggcggacgctatcggtatcccaaaggttgctgactttatcatggcattctatgctcctgacgagttggctgcggtcaaaaaggcccgcgccagtatcctcaaaaaccgttatgccaacaaacagaaattgaaatcattcttgttcggtatggatcaggataagcagattttgtttgatcttgactggaatgaagtcaagcgagatcttactgaagaagaagccaaatatgttgagaatgtccatatcaaacatgatatgaacaaaacagggaacgttgtggctgacgcgaagaaagcggaaacggtcaacaactggaactttggctgatttcaataaacggatcatgaggtataatcttcatgatctgaatataaacccaggagcacatcatgttgcacaataatttcatggcggatctgctacgcgccgttgagcaggtgtgccacaccgagaaggatacgatcaatctagacttcgatcagactatcgaattctttaaatcacgccgcgcttggaaagattataacgtgaaagtcgtggcgaaagaaggggaattggttgatctcgacttgccatcattccccttacccgtgcagaccgaaactcaggaacaatacgaaatagaaggtgttcgcattattcctaagtttggttatcatagtatcgtttacttcttcctgagccggattggggcaaatatcatcccgaccggaatgcgtatctaatagagggcttaacatgtctgtagaacaaattggtttttatgaaatcccgaacgacccggcgctgcgcaagaaactgtttgacactatcgaaaactgccgcgccgcccaagtccgtatcaaatcagaacagacgtacatcactgatgcactgtctgaaattggtaaggcgacaggcatcaaagcagctgatctgcgtaaagtcgtgtcagaccgcgccgctggtacttacaccaagacaatcgaaaccagcgccaaataccaggatctctacgaatccctgttcccgaacgccgcgccggatcgtgatccgaatacttccggtgaatgaccgaccccaaaggcccaacgttcgttgggctttcttactttcaaaacctttacttcaataaacatccgcgctatatttcattttattgaattgttgtttctaaatcatgaggtgaaagatggacgccaaaacctaccagatcccgctcgacaatgtcgtaattgtccaggaacgcctgcaaaaactggagcgcacggcaaatcgactggggctggtattcccgacggtgaccatcagtgaaccatacagaacccaacacaaagattctacgtctggcgaaattttctatcgttggtggcgggacatttctcttgaaggtgaaggcattgaccgcccggtttcatacggcggctggtctatcatcggccagttcaatcatcaatacccaaaggtcattctcaacaaactgaccgacgacatcgtcccgcatttcattcaacggttcgaggcagaaaacgtctcgtggtgtgagcattgcaataaatcagttcgccgcaataacacatatgtggttcgtaatgaaaccagcggagcgcaaatgctcgtcggtagcagctgcatgcatcattacgtgcctcaccagaagtccctggatgccgtaatgggttattacctgtccattcacgagctgtttaataaccaggacgaggatggaatctacgggagccatatcccgactaccgccgatacccggagctatctgcgtctggtgttccagatcttactgaccggagtcagcatcaagtctaatttgtattctgttgtcatgggttgctttgtagcaggtgaagctccgaaggacaaatcatctgaagcatgggagatttatcagaaggcaaaggggttctactttgatgccctaagtgagatggatcatatgatggaattcattgcatcgctgcctcagaccaatgacttcaatgttcgcctgacccgtatgtgtgaagctgggtatcatctgatcaaggattctaccactgttcgctggggtgccgtcaaatattacgaatacctccaccgcgaatgttcacgtaccaataaggcagaaacaagttgggtgggtgaagtcggggagatgattgagaagaccgtcacctacgttgaccgcaagttcctctacagcggggattggggcgattcctatctgtatatcttcaaaaccgaagaaggtagtacgattacatggaagacttcctatattgatgcggacctggaaggacagatggttatccggggccgggtgaaagaactgactgagtatgaagatgtcaaacagactcagattaccagagcaaagttgaggacgttatgacattattagaaatgaatgctgcggtgctaaccaaattcatcgcaggtgaactcaagatcggactcgccgtatttggtatcactaccgttgccttggccatatgggttctgatctatctgattaagaggaaagattgatggaatgttcatgtggagggcaggggacgagttcttacacccgttaccccaccgtgaaggaagccgaagctgctggattccgcgtagaaaaggctccctgtgtaatcgccttgaaagactgtccggtctgtaagaggcactctcaggacgtctggtatgagccaggcgctcaaccaaagacagtcaatttgctgtccatgatggggaaataaaatgaaagacgttactgatgaccaattgaaggagatgtggaaacagacacaaatcctcgctcaaaagaaaacaggtgatatcagaaatttaaaagaagaactttctggtttgtctgaccattccatgcaacttgaaatcgaattggttaagcgtggctatcgtatcacaaaacgtatttggagctattgatgactaccattgtagaaacattattcccagggtgcacccttgggcgcggcggcagcgaagccaacgggctggcaattgatgtagagcctcagaactgtaccatcattgacaaatatcatgacaaccactatccactgagcgaacgtcgcgaccattatctggtttccgtgaacgaaaccctgattcatctgcgtatttgtaaggctatgccgggttacaactatgaggcgtttgccgtcatccatgatgtttccaatggggagctggggaaagatgccctgttagcaacatttaagcgctggaaggagtctttcacttcttgtgaaccgcccaagaaataatctattgatgtctccaggggtataatacaaagaaccatacccctggagacaaaagatgattcctctgttagaagcaattcacactcttcgtgaaaccaaaggcaccaatgccaagaaagaagtcctgacccaaatcctgaaagataatccggatatggtggactttcttcaatacgtttatgaccctcttcggtcatattatcgtaccaagttcctcccaaacgccttccctcgcatgcaggcgctttgtttcttgaaacaaatactgagtgaattgccagaatcagaattcatggaagcccgtgaattcttgaaaactgccccgatccctggtgaagaaatccttcgtcaaagattggaagaaatagctgtcccggaaatatatgcagagttgtaccgtttacgtgaagaaataaaagggccagatggttttgagacctggaaagacgctgctttggaagaaaagaagaccaggattgagctacaaagaaatataatccaatcaggtaaggatatcgattatcttactgccatggcagctttccattcagacaaatggcataaaatggaccccatcacagggtatatgaatggctggaatgcacgtggattgttagccaaacgtgaggtgatctgatggatacgctattcaccctgatgtgtacaatgactttcgcgctgtctctggttatcagctcgttgtgtgccctgctggtgtggatagcgttgcctgatgtcgccaaatacaaagtcctcatgtttttggctattattgtcatgagttttgttttaacaattcactatgccaaacaggattataatcctgacaaacgttatgcgtcattggcggagagatatcatggcttcgaatttaaagacattaccagaaaatgattctgagtatttgcgtcgcgtcgttttggaattgggcgtgaactatagcggaatggccagattgttggattgttccaacgcagtcggattctggaagaaaggttatcgtcggatacccaaagcattccgccgggcgatcttgatgctgaaatttataaaccaaaaaggcctcatgtctgagttcttgagatatgtgggtgaacaggagaaacaaaatggtaactgaatgggaaaagatggaatatgaacgggcatttaacgtttattgtatctttatggccatcaaactccatttcacgaccaaggattatgattacggcctgtatggcccgatgagcaattacaaattcgaaacgttctttgccaaagaaggtatgcggaaacaattcgctcgattggcccggcggtttgagacttctcaaggcgaagtcgttgagaattatatcattgcaaatttcataaagtcgcccaagacctgggtgacaacattgttgaccagacaggcccaagagaattataatgaatatcggaagttgtatgacaactttacatatcacttccttgacttttttgaaaagaatatgattccggaaattaccgggcgcggtctgactttcctggattaccttaaaggtgatggacaaacccatccggcattattgactgatattatcatgaagaaatatccaatttggtttttggtcggactgaacaaaataacaggattcatcgcattttacgataagttgttgaaagacgatatctattggaattcagaggcattcttgctgaagaagactgatgcggttgtccctaacgaggatacagattacgccaaaaataaattccgtgagatgatcctttcccacggaatttaatgttaccaatcccaaaggatacgggatttatcggtttgattcgacggttccaaattcgtactgttgaaattgttcgtcgtgctgacctttttggagttatcgacattctgctgaataggggctatcacagaagtcggcggctggctatacactgattgtattttaccaatgttgtcagccgcccgtccttgcgtcggcaatgcgccgcccaaagtcccaccaccgattgatccataagcatctttcagctgggtattacggtcagtcacattggttgcatcggacgttacaccctggggaataggcgtaagtgtctgggcatcctgatttaaaccgccttgggtgggctgttgatcagattgtggagcaggagaatttgtcggttcttccgttcctatcatcatagactgtcgggcttctgccattttctgtcttgccgtttcgccgcccaatgcgtcggggataatgctgacgaatttatcgacgatgtcaaacatggcattgacgatggcgttaatcatgttgaagaacggctttttgacattctctgagaatcctttcttgatgctgtccagcgttttactcgcggccgcaattccgtcatcaataaacgaactgatcccaccagtgacccaatccaccagtttcataagttcgctctggagattatccgccagcttaccagggatttcagtcaatgatgtgttcctggttatcccgccaaacagatcattagatatccaatccatgatagagtttagccattgggcaggtttctcagatatccagagggtgaactgccggaattttttacccatgtctgtgtcgaatccgaatatcttggatacccaatcgaacaagtcaccgaaactgccgaccaattctgttatcccggcccgcacccggtcgacaatagtcacggatgctttccctaaaatctctttggcattaatgaatcctttaccgaattcaaatacagaagagatcaatgccagggggccaaccttcaaaaacttcaaaactttaccaaacgggccgagtagcttaacgatcccctccccaattttggagaacataccgatgaacacacccacagcccaaccaattgccttgaacggtttcaggaggaaccctttgagggcattgaggcctaacatcgctgctatggcagcgcctattccagatgagttctcatctttctgatcatcatctttgggaataatagatgtcgcctgaggagtatgtttcccttcttttccttcctcaccccggcgcatttcttctttttcacgccatttttcattgctgtcaaatatgcgcaaaagggtgttaacgatatgaccgccagtcttccctattttcttttcaatagaagacaaccgcacgagttgttctgaagaattcttgtctataccttctgtattccatcttacttcatccaggctgtcaccaatacgatttaaatccgaactgatgccgacaagagttccttcttgattatccaaccgcttgaggctgtcatcattggctgctttcaactgatctgatatcagattcagatattcagtattggtatcatcagcgggctggcggataaggtccccaaggcggtcaaccttctcgccgattttcatcaactcttcgttgccgtcaacagcaacatcaacggtatctttcatccaaatgccatagtctcgagtgaatatcggactcactcgagcgaagccattgacgaagtcgttgaccgaagggattttgaactgaaattctgggacatctttctgcttttcagcagcctgtagtttttccagatttttgttcatctttaccaactgcttgttggtctcattttgagcacggagttgtttcctctccatgatctctttcttgatcttgtcaagaacttgagcaacttcagtctgggatgtttgtgctggctcagccatggctcacctcttacaccttctgtgattgtcctttgtcaacagggactggcgtcggttgagatgcaacagcctgatttgtctgaggaggcagaaccttctcaatcatgctgtctttagcgatctcagcaacacattgataatcgttagtcaggcgtgaaattttatgacgaattttcgttatgatataatggcctgatgataacttacttaactcagccaggttttcattttgtttcggtctgtttgataggtcttcaatataatatacctggccaacattcagacggttgtcaccaaccaaaagtaaacgcatgactgtagacgccagactgaatttgataacacgttttgcataatcaacttgctcagcaccgtctggttgcgcttcgagataacgaacgttttcacgattaaattcgtcagagaacaacggatacggatccagatgggctgtgtccgcaaaccattccgtgtacacacgagaggtaggcgtgaccgttttcgttctgaaatcgtacactctttcgtctacagccagaacatcatgatagttcgccataaattggtcacgggccaatttcttttctgctttgattatcgtcctcatgaaacgctcagagttgaagttgttgttctgcaacaacggggcgtcctggggatcacggaagaatttcttttcaagagcggcttcttgtttttcttcagccgtcatagtctgattaccttgattgaataaagtggtcagacttttgaaatggtatcctgtgaaatcttcgtagaaaacaaagggcatgaatatttcatcataagaccgccgggccatgtaatcaatgctcttgagtacaggccaaagcggtgttgcaaatcgttcttggataccataagtcggatcgatgtcttcaaatttagtgcgtgactcgagcatctcaaatatcttcgccgccatatcggaatatgatccttgaagcccaaccgatttacgcagcatgctgtctttatatgcatcagtggtcaccaggtgtaaccagaacgctttcttggctgaggaatttgactcatcagcaacacgtccaacccggctgacccggaaagataatgcagtgtaatctgtagccgccggggatttgaatgatatcacgacttcttcgccaccaaggattggcatcgtgtccagaatatcccagccttccttgatcaacacattggcggtcaacgatggcgacacgttctcttccaaacccaaatcttgatagatgttgaattcttggaataatgaagtcagatcatacggcgttggggttcctccttccggggtatgaggaaggatggccatatatttcaaatcaaacgtcgtggacggggttaaaataccgtcttgtgactctttgttctcaatcatttactcagctcctgttccagctggctgacaaacatggaaacataatcgggatcaagcacttgaattgcgcgtttcgcctggtttttgttgatggcatcgtcgtgatatgatactccggtaaggccataatttgcaatgatttgggaatcatccataccgttgagaccataagccatacggatagccctggcatcggtctcatgcccaaactggtcgacatagtatttgatgtcccacataccatccaaaccgtattgagcgatcaattcttcaacgatccgttgctctggttttggccagtcgttattgatatccataatgctgttgatcatacatggtatccaaaacagctcgaaggacccgtagacacgttctgcaaaggaccggggcgtttccccgtcatagatgttataaggcaggagaagcccttcgatgtccttaattttctgtataatcatcacgcggtgcgataggttctgtaatagaacctgatcatcctgttggcaatcaattaactgatgccagacgagggggaatttctcaaagaatttcataatcgtctcctggattagaagctgtcgccttcggtgtcaaagcgacctttgtgcagaggttccagttcgataaatgtcatgtcaatttgggtagacacgatgctatcatctttgtggactgcatacgacgaatccggggtttcgttgacgaacatgtttgacagaacgcatgtcgaaatccggtgcaaccatttgttgcgttcaccttgcaccatgaatgtaatatcaaatgtcgacgggtgcaggtaaaacgcgctggagttcttgttgtatttgtattcaggatacatatgcatcttgaacagacgaatgatctctctgaccattttggcttctttctgagagcgcggtgtgaatttgaaagtgaatgggatttcacggtttcgcactccctggaagatcatttccacgtatggattcgtcatagtgccagtgaacaactccagagtgtcatgagcgttaatcgtcggaaggaacgggatagactctgaagccgattggatagccttcgtcgcggcaaaccgacccatttccttaccaacattgagagcatcaccaagtttgaactggctcatatcctgggcagcgcgggaaaggaattgggcacccataccagcgagacccaactcagagccgttccagccaacgccatagttggtagtgatggattcgggcatacacaggacaatggactcgttagaacgcacgtgacgcgcccaggcatatttgctgatggaccctgatttggtaccatacacaacaggggtattacccagcgggttctggatagggttctgaaccgtctgtgttgcggtgcttccgtaagaagaaccagagatcctgttgatgttgaacagaacataatggccaagggttttacccccggtgatatccagcggatagaccaattgtttctgggcctgtgtcaagcctttggtgttcagaactttgatcttatccagggtagacttgaaattcgccatggtcttcagcccttaattagaaatagaatgttgacactatttaggactcaattatggctatgtatcttcaggggaaatatgcccccgtaaatcccaagaaatacaaaggtgacattcataaaattgttttccggtcttctctagaactggtggcattcaaattttgtgatacaaacccggctattgtctattggtcatccgaagaaactgtcatcccttatatttcaccagttgatggtcgaccgcatcgctattttatggatttgaaagtatggaccagatcagccaatagtgaagaactcaaagtcacattgattgagatcaagcccaaagaccaaatcaaggaaccgaagaaaacgaagacaatgaaggaatcaaccttcaataattctatgcggacttatctggtcaatcaggctaaatggacagcaacccgagagcattgtgcaaagatgggatggtcatttattatctggacagaagagcacctcgttcctggggaagatcctgatgtcaagaagcaatttgctctcagatctaaaatgaaaagagaaaaggaaatacaagatcggcggcgggaagagaacatcagggctctgaaagaacaaatgaaaaagaccatcaaatcgaacgaaccaaaggaacgtgatgatggtctcttgttgccttaacttatgatcagctatgcccgggagctatgcattttaatttatcgcgactgatataccaaccatccttccgggcttctttagcacattcagcatatgtctcacccgcatatattttgggatacgacgtgctgtattgggaagatctgtattgagtgcagtcagaacaatcgcaataaagttccaatgaataaccagacacgatcataatcagttatccagatggtcgtaaattacgcgacggaaatcattgcccttggcacagcccttggcaacaagacgagtgccgccagtaccaatgacgctgatcgttgaaaaccgcaggacgcgcccggtgatggactggtcgacctttacggtttcaactttacccaaacggagttcatctgcatcacgacggataaaccctgttttgaagataacgcgcttgttggtgacggcaaattcagtcgtcaggttccgaatgaccgtgggaatcaggaaaaacaggctgataccaaaagtcggaacgaggaatacaaccacccagaaatagacccaaaatccactccaccaggtcgggcgggtaaagccaatcacgtgttcgttctggccgagcatacgatctacataacgcattttgttttccttatttgtcggggtttacgcaaaagggagttgtggtcagctcgcctttatcattaaaactatatttcagaatggcaaattggtcaaccatacgatagacttcaatgccggcattcatcatttctacgataccagtggtgatcctgtacggttcacagtagatcactttatcgatcttgccgctggcaataatacgtttggtgcactcagggcaaggactgtgagtgacgaacataaccaggccacaccaatctgccgcatgttgaggtaaacggttcagagcattttcttcggcatgaataacaccatcagataccagctggccgtctacttctatttcgcacacattaggagcgccgggtgcggtgccattccagccaatagccaacggctgatcaacccgaggatctacgataacacatccaacctggagacggcgggcataactggttttgccatatgcctgggctgctctcatatgggcaaacatcatccttggcttaatcatggacattgacctcttgtgagaacatgaagatcaaatcctcaccatcaaacttacatgaaaccgccagggaagcaacccaactatgaacgatattgctgatgacggttcgcatttcgtctttcagtgtatcattgacttcgcggcctgcgaatttctcaagcgcggtggttatgacattatcagcatgaggataatgattgacataacgcatcagatatttctcacgcagaacgattttgtccgtaaggtcagacaactccgcagcttcttctgaataaaggcgttctttggccttcaattctaacacacgttcatacaactcttttagcggcatcataatggcatctcctaatgaattaaggagagtatatactctcctttttcaatacgctttcaaatttagttcaggcagatttctcgccccagcgcagtcaggcgatagaattggatcactttcccacgagcatagcggtaattgccgtcaggggcgtcatgaccgccatcatgggttacagtaaaccaaggctcaatcaaccctttcttgagcagagactccccggtttgggtatcccaaggatcacccaggacgttggtcagatgccggctcggggtaaaattccaaacgcggacacccttttcgttcttccaggacttgacacagcgtttttcatgacggccatgacgagtgaggcgaacgccgtcctcaaaattacgcatacccagcatataattcaattgatgagccgtatagcgaggccacttttgagttttcacaacagtatctttcgctttcataatattctcgctctttcaaggatgatttcaacttcaccccaatccacgaaggggcgcttagacattgggtcataactcagaggacaaccaagagcggcatcgtcaatatacaattgcgcatatgcttttggtgaatttgtccattcatgctgtgtcggattcttgttgataccatacagcgggatatcaaatgactggaaccaatcaaccgcttcttcaagttgtttcccgctgcgcatggtgaacagaatcagaagatgatttttatccaccaacttttttagaacctctacagcaccaatatggcgtccgatgagaggatattcatgggtaacacatgtcccatcaaaatcgataccgattatcatgattttgtctcatattcaggaattattttaaccgttttgacaccagatacattttttacggattcagcatgccaagccatttgtttcataaatgaatcaaccgctcggacaaggcgcatgttgatagattcaaccaggattaatttggccttttccaaatctgaggaaaagcaatatacacagcccgaactgatatcatttcggatgccaggtatgaatttcattagatcggcgctgcgaatatttctattgggatagcggtcgccccagcggtcgcaaacaaagacgatatcctttatcatcttttcagttttcttataatcagtggtggaatcatatgcgatagtctcacccttaccgacataaactttcaaaaaggcttcttgtgtcataatgattccccattgtgcagctgtaacagttcttcaaacgtagccgggcggcgtaaatgatcccagcttgaattcaggtaatccgggttccctactttgcgggaatgccaatgtccgtgaacattatattcccaacgatccaggagtacgggcacatgagtgacaatcactttggagatgctgccgtcactccgagccatcttgtattcaaacagagagcaaaacttgctgatccattcactaaggaataactgcatcagcattgaaaagctgtcgtgattcccctgggttactttgatgttgaagttgggacgccaatcatcaggaaccttgccatgcatctttggtaggttacgcgccgcgccttctctcatcagtttgatgaaagcatccgggccaccgaagcatgtgtcgcccgtaatgatcaaggaatcatcccgtccacacgtttggaatatgctgtcgataactgcgatgtcgtgttcatcaactgtttcaaatccacgtgatttggggatctttttatgtttcaggtggggatcacccaaaaagaaaactttacccgccatattcttttcctatgagatcgttatagaaattgattaacataccgtcaatgattacaccctaatcattccgagtgccttcgcaatatagccttcggcccctttcaaagaatccttaatgattttatgaaattcttcgtatgacacgacatggccgtcagccatatatgtgttagtcgtcatgccgtgagaatcacgggcataataatggtataattctacaccaccaacattgaatgtgacagttctggtacgggatatgctcatgatttgtctcgggttagatagatatatcacaataatacgttatttcgtatatagaaaagccccttacggggcttcatctttatcagatttataaacttcccatcggcctattccacgccattcaccaagatcgttccaggtgcgagtccctacccagccaccaacttcataataatgacatatacatgcccagaagtctttgaaagttacttcccgagttggtttcacacatgcgatttgccagcgggttaagctgattgcctggaacaatggatggatataattgctatagatcaaatataacgcgatgagcacaatgcatcccacaaatatcataccgatagcagtgaaaacaaacattattccacctttaatcccatcagatcttccatggttttctggatgcggagccaatccagcgcagcatcataacgaggatcatggtataccatgccttccagttcccatgccttgatgccggcatagcgatccatctggccaacgcctttcagccagctgacgatatcaaatgtgtggtgataatcccacggctcattggagtattgcccgcaagtcacttcaatgatatgctgggctttacgcaggtcgaatagatttcgatcacaccagtcaaccgacctgggatcaacccccaggcgatgacaccctttgcgaatttcgtcggccagctgatagatggagatatcgtcttcctttggatacaggctgacttcacgggcggcatcacatggattatatttcccgtttcccagccaccagtctacagtcactttctctttgacacgaccgaggtcgatttgctctttgacattcaatttaatgaatgtggtacgttcttcgactagttgttggagagtataacgtttggtcaaatcagctactgtctgcgcccaggataacataacagcatcatcccagcggcccagggtttcactatcggcgaccgccaaaatatttgatttatacatttttaccctccacccggataatttcttcttcagaatcgacgacgttgatgtcatcatccagcgcgttcagattttccatgtcttccgcaaacttgtctacttccatgatgtagaacacggggacaacccggcggcgagtgtcttcgtacagggtttctgccagcgcttccacctggcggacaacgtcataaagattaagaccgccaataccacagccgatagctggcaggccgatatagaccgtttcagaatccttcgcttccacaatctcgtgaagttgttcaaacatcacttgtacagaactgataacggaaggcatacgagcatttgggcctgtatagaattgagtatacaggttgaagccccaaacacccgtgtcacggtcaaaggcataagacatgccaccgagacgctgctccggcccgcgctcatcgttctggtctgcgcgccagacatcaggaaaccccagccgaacgaaattggcgatacccgcgcccatcaccgaccagcaattggcgccatgggcgaatccgttaataagattgaaacttttcgcggcttccaacaaattcccaccacgaacgatatacgttgtcatataattcttctccaggtaatgttgatgtcatcaataaattcaaggcaaaaaacgccgccatgtccttcactattgttgatggacatgatagatgttctctcgtcggtggcgataagattaaccccaaaccctttggacatcaaacggaaagcgatttcttttacgatccgattgagatacgcaggggtggttgccggatcaaaatatttttcgaactcaggcatcaccaattccccttcatcacgctttccattgcgttttcagaaatatattcgatgaaatcattgtcggacgccatcttcaacaactcgaataattcgttaccgacggcgcacccaaacatcccttctaacattcccttcacgttttcatcgatttcttctgggtttaattcatataatttcaagcgacgtgaaatagcccgaaattgcgcgatatcaccgggttcaaatttggccatggtcatttaccagttatgggattaggcggtaataataccgcctttttattcaataaaggtcttcggagaaaagctgattgaaaggagtattcttcagacgaacttggttgacttgcccggcttctttagcgacgatcgctgcctcttcacgagttaagaaattgccttggttgtcgatgaaaccctgttcacgggtatgggttgtggtaatgaccccagcttcttttagaattcttaactgggaattcatcaataggctgtggtgacgatcagcaaccacgatcacgtcaccatatttgttggctgcggccacgacacggcgctgccattccccttccttgggtaggtcacgagcgtacagggcaaccattgtaccatccggggttcctttgacctcagagaacaatcgtccagtaccaccagggagttcacggaaataaccaagtagtttcataatctattcaatccatatttcaggttcaggaatatcgaccatatccacagtctggtttttcagatcgtgaaaacagtcgccaagaaattgtattttgccatttgtcaagaacaaatgacagcgtgagcctgggcgatctttaaacaccaatagacttggagtgaaagtgggtgcaacaacatcattgttccactcccagatcgggccttgttctggagaacccttcacgcgatatgggtgaagcatattacaaccaggacattgaaaatataaagaatcacccatagacaataattttgaactcaggaatctgctcatcagctgtccatctcctcatatggattgtaagggcgcaattccccgataagtttaggcaacaaggcgaagccgaacagattgaaggaacgcatagtgcctaccatgacaacatcatcgtcttcgtcagtgatatctttcaaagaacatatggggacataggcatcgaagtcttctccttccccttcttctacaagggcgaatgcgacttcttctgatatgaagcgagggatgcatatgtcaagcacccaggcaaggaatacaagaacggaaatgctgcggaaatagaacatattaaagccctcgcaggtggcgggggcttttggccccctgtattatagatcgagcagagtttccaactcgtctagatcttcattgtaaagatctatgtcctgtttcttatttaactcgtcccgttgaatttccagattcttaatctggttcaacaggcgctcgcgggcgtccaatgtaatcgaggacaatgacatcttgaataaatcgtcaaggtcaccgtcaaagtccgggtaatccgtctgaaatagcgctttcaattcagttagactacggcgcagatctgttataactgcccacccgataaacaaagcacgattgttcattttgtggatacgggcgttgagatcattcaataggtattggcgacggtcttcatagcgttccaggcggtagttgaagaatgcatacagcatatctttccaaccattgaagcgttggataataccgctttcgttccaggatgtccaggtcggcatttcagctgagtacagccggaacatctgttcaactttggcgtcatctagtttagacaattcaccacgtttgaacacaacagtgatatcccaaccgtcttctgtggaatcgttggaatactccgtgagaatccctgatttatacagcggaagaataatcttggtctcataatccttggcgaaccagcccaccggaacttcagttatgcgcagggtagtggcattgagacgttcatacacaccgcgacagtacactcgaccttcctcagtgtaccctgtttcccccttgtaaccattccaatacggtttcaagtcatttgggtcttcgccacggagaagcgctctcagggcatccaggacagactttatgctatggcatggggttttggtagcatagccgctaccgataccgttcagaccattcacgaggaacattgggataaccggcaggaaaaactttggttccagcctttcctcaccaagataattgtattccaggatgccttcatcttctttccgatagatcttacgaatcacgccggatactgccacagaaatatatcgcggtgatgacgcttctttacccatgattgatccgaactgaccatcacgatcaaaatacgggatattgttcgtccctgggaaagcctgtgccatattgacgatagtgttgctcatgttctcaccaccagatttgtaattggtacgggcggcggcgaacatacccaggcgatcaacaatctcttccttaccgtattccaacgcagcaaacaaaatttttcgctggctgggcttgaggctgtcaattaacagaggaatttggcgaacgctgttaacaaccgaaaattccttatgatcggtgttaacaaatgatgtcacagtaatgcttttggcaaccatcttattcatcctctgtttcaaataagcaaacgtcactaaaccaggtcttgcggtaatccgacgccttatcaccgaacccatcattcaatgaattcttgtaggcatcatccagaacgaccgtcgtagtatacgcatccagattgtttagaatacgtttgaaatcttcggtgctgttaccgcccagaccttttagatatttcttctttgtgatctttttagattctggggtcttcatgaactcttcatattcggcgttgttcatgaactcatgcatttctttaccgcaccacacacgcatgtacggggagcgcagaagtttaagacgcccctggcgcacatattccggccagaacgtacagtacatggtaatcaacaggccacggatatgaatgccgtcatcgtccgcgtccgtagcgacaaccgtgcaaggataacggctggtgtcaatcggttgccccggtactgcgccgccgtggatagtacacaggttcttgaattcttcattggccattaccttggcgcgtgaagcattcaggcagttgatgaatttaccacgcaaagggaacaagccgatcttcttggtgtcacgggcattgaggatagggttagatgcactatccccttctgtcaacaccagtacgcagcctgaacgatcaccacgagccgtcgcgggataatacttttcaatctcacgataatcccgtttggtaatttcctttttggccttttcaaactcggcgtcatcctgatcattacgcagagccgccagttccttacccagaccgatggtaacatattccagcgccttacgaatcaagcggtcagacggtttgtatgttgtcccaaattggctgacgggtgtggtcatgcgctctttggtctggctatcgaaccggggattgtcaatgtccgccgatatgaagagcatcatgtggtttttaatcatcgctggcttcaattctgtcttgaacttcttggacagaggggtacgaattgcagcgacgatctggtcggcaacatagtcaacatgtgggccgccgacgtgagtagcgatactattgacatatgacgcatgcatgaacgtgccattggacggcgcgatagcaacagaccaatcacccgattcgtctacagatgaaccctggcaaaagtaatctacgaaatgaccaaagcgatcaatccggataggcttgccattgaggacaatcttcagacgagggttacacgccgctacttcaaatgcccggcgataaatcatgagaagattgttgttatccagacctttgatacccaaacgttcataatccggaatccaggcgatagtcgtacccggcgcgttcaggttactgatcgttggctctgaacgtttgctcatgttgttctcaaacgtctgaagataagacttcttgccgtcgttggtagatacccggaaccattttgagaacacgtttacgagagaagcgccttcgccgttctggccaccagatttcttgttgttgtactcttcgtcatcatcgttgaagttactaccagcatacagggagccgaagagcatctccgggagccattctttggtctcaccgtgttttaccacagggatgccgccgttgtcagcaacgatgatctggccgttcatcgccattaccgtaacagtgatctcgttgaggcgtttcccctcaggagttttgctatggtcaacgcagttcgtgataatttcatcgaactgtttgatcagcgccggggaatatgtaaagttgtccttgaacacaacctgatcttttaccgggtcataaacccaaaccgtcccggatgttgaacggatactacccagatggcgttctgggcgaaggaggatatgctctacatgggagagcttcttgtactttctttcaatgttaacgttactggtcatcttcctatcccgtcaatgtaaacacacaagattatgtatgggattggcttatagaccaaatttgccccgccacttttcgactttgtgctcaatagcgtgttccaccttgacaattgtgctgacatggttttgattgcagtcgcacgcaaattttgatgtatgcttgataatgctgttaatcagatcgaccattcgatcatttgaacgctggggctgattcagaagtcgagtgattcttcctttgaaatggttaatcatcgccagttgtttatcaacggggtcaacacccccgcaaaaccaataatcttctaacgtgtgctcagacaaatcacttgtgtgattagcctgggccaatgcatagatgatagaatcaaatatttcgtccttggtcatggaaccatattgctggacgtgttgatattcagtcacatacagcaaatccagcgctgatatgatgacgtctgctacttcgccattcaaaggctcagacgcggcgataccatagaacacgtctgataattcacacgtttcttctacaagtttactgaatacaaatactgaagaacgagagggattcatcgtagtgcaatcatacgatgtgtttaaaatattacgcagaaatttcatttcaaatatccttctagacggaagcggttgatgtgttgtatgataaagtccatagagttttgaaaactatattttccctgatgttcatatgcatgtatcaggggaaggcggctgtgggctaattggaaacgcagcttgggtggcatcgtcagcaatttttggcttgttgctgcaatgatgtcgtgtttaaatttggggtcattaggagacagaacgacaatctgcgacttggccagagtctgaccgaattgtttggcatcatttccataaaggctacgcaggtcatcgtgccgatatttgagccaataccagtagccttccatcgagttgaaaacaccatcgacagtatccatgggatggtatgcaaaatgagacaggaatctccccagctcggtgcggctccgactgtaaatgttgtaatgtgtcttgccttcatcatccggcgtcatacgatcttttggaacattgagtaataggaacatgatataggattctcaaatcaatatattgctgtgcgtagtagatttataatttcctgaacgcgatcaagaaactgacgacagataccgcaccaaacagcccagacaatataaatctgaccaaagggaattcaggggccgcaacaagactgactgcgttttccaggcatatcatgaatgatataccacaaagcattcccagggcgaactgattcggtttatgacgtaaacgtaccatttcacacctcctctggttgattaataggggctttgggccctattatctagccgagaacaacaactagtttcaaattagtaaaagccgagcgactatcttttaacattttatgtacagcatcaagacgtttgggatcgtgtaaagtatcagagaatacgataatatcagccttgtcaatcttggtgcctctataatgactagtcgtggtggtactgtctttcatatcaacatgcggtgcaggtgcgttataaggagaagaaggagaggaagaaaagaaagaatcacgctccctttcactgtgaaagacagccataatacgaacattattttctgtttggaaattgtaagacataagtttcttcagcgctgctgtatggcctgtctgcctgatcatacggtaatatagaatattacccggttcaataacatctaccaagctccgcgattcgcggtctttttggatttcgtacgcatccaatataagttgttgtatcatctcaacgtgagcattcaatgagatttctactctgcgttttaccatagattgcatttgtgtatcctcggttaagttccgctcatggggaactggtggattataccccgagtaacacataaagaaaaagaggccgaagcctcttttattcatcatacttgcctgtcctgaaattccatttcttggctttgctgaagtcaatatccttgaagatattaccgaagagtttcttgaactctgattcctcttcaagatccttcggtttcttcacgggttccttgaccataccgccttcgggtttccccacatcggcggtcgtggtggcaggaggagaagaatcttcaaggaaatccttgaaggtcttcatattagactacagccatttcgcaacgggtagaagtcactgaatggccatcggcgtcagaaacaacacaccaatattcgccttcgtcggcagcatccacagcagtcacaaccaggttagcggttgatgcagtcgcgttggtgccagagtcaataaccgaacctgcaccacccggcacatcagagaaataccacgcataagtgtacggggtagtgccgcccgcagcgacaacgctaaatgtcgcgtcttcaccacctgtcacgtctttagttgccgtcagatcggttgaaagagacaaagcgcccgcaacggtgatgacggttgaatcgacatggttgccttctacggtgacgccatagacggtaacggaaccggactgaagcagtttgaatttaccgccgccgatatggaccgctttagtcacgtcgccggaataccagttgacgcctttataggtcgcattcgccggggccaccgtcgccagaagttcaaccacctgcccaatttcaccattggcggttgccggggtgatagtcagaccagtagtcaggactgcgctgggatcgtgaatttcgtaagataccaggaagccaacgggcttcgaaggatcgattttggtcacgccgtctgcttccagattagacttggtcagcagtgcatcaagacctttacattcggtcagaatttcgtccgggtcttggttcagactggttttctgccagcccttggcaaccccggtaacaacatgaccacgttcggtctccggtttgttgcgtacaacatacggcgcgactaatacattgattgttggcatggtttcctccactcatccaaatcgttgttcagagccatcatcagctcgttatctggttcataagaaccggaacataaatcatctctccatacacctaacgtcaacaacgctgctttcagacgaggatgttgggacttgtcagttttcaacaccaacattcggcataccgcctcagtctcaaatgtgttgaaaagcgtaatcaattgattgataaggactcggggacttttcccggggacaaatcgtttcaatgattgattaattagcgaaattcgctgaatgtccaccatcaaatcatctcttgagacacaaggagtaatataatgcctcagagcgtattccattaaattgctttcatcaacaataggcatatagaataagttcagctgttgtacactggacttatttaatctggagtttttcgatcaatttggcgatcaatttgtcccgatcagtttctacaatccccagaggctcgcccaacacggatagatcgttgatatccagaagattcaaagtttccaccgtaatgtcagtgctgacgaccgtaccgggttctatcggtcggccgaatttgtcgcgaccataacgtttaagagtcccagcaagcccggttagctcctccaaaagctccttatcgccgtttttatgctcacacacccaaccgtagtcgccagcataaactgtcgcgccgtcgccaacgttcgggatgttatccaggacgcgctgcaggtatgatgggagtttctgttcttctactgcggtgattgggtcaacaacagcagtatctttaactttcggtgtcttggccatgttcagttctcctatagactttgatatatttaccacagcaattacattgatattcatgcatacagcgaccgtcgtcattaaaatcacatgccccacaacgacagaataattttacaaattggtttccttcaatattccttaccgggaaatgtttatatgaatattctctcatttcaccgtcaaattggaaagagtcgattaagaacttttcaattgttctataagacccaaatgtttgacgaccatatttgaaataaacatctctggtttccatgaattaactccaacaaaaaggggccgaagccccttattttacgctgtcgcga

SEQ ID NO: 44 - DNA, 49876 bp, unidentified
  source 1..49876: mol_type = genomic DNA
atgtctgaagaacgtagaaaacgcgtaacgaaatcacactttgaggggaacttcaaagcgctatatgaaaaggagttcggcgtggtgctagggcgcacagcagagatgacgccggaacaattttttgatatcgcaaagcgttacttccagtgggccgaagagaacgcaatcaaggctgcggaaacggcaacgtttcagggcgacgttaacgagtggggagtgaacaagcctcgcatttttacgatcacagggttaagcctgttttgcggcgtgaaccagtcaacgcttgggcgataccgtcacgaccccaactatgctcccgttatggagttcatcgactccgtgatttatgagcagaaatttcagcttgctgccgtcggcatgattaacgcttctttcgtcggtaaagagatggggatcgataagccgccagtgctgaacatcgacgctatcgccggggataagaacgagatcaccgaagagaagttagagaaggcagtgaccaatattcttgataagctgtaagggtcagatatgaacgaaatgatcatttgggaagacctgtcgccagccgataagctggcaattaaggcgcttagtacgcgcaatttttcgctgttcctgaaaatctggttccagatcattcagggcgaaaagctaatgtggaactggcatcactcctacttttgccacacggttgatgaaattatcgccgggaggcgcaagagcacgatcgttaacgttgcgccaggctccacaaagacggaggtgttttcaatccacctcgcgccgtatgcgtatctcaagtgccggaaggttcgaaaccttcagatctcgcagggtgacgccctgtcaaaaggcaactcggatcgcgtgattaagatcttctcatcgagcgagtggcaggagctatggccatcaaagttcgggcgcaagcagatcgatgaatttcaggtcatggacgataacgaccgcgtaaggctggaaatggtctcccgttcgtccggcggccagatcgtcggcaagcgtggcgggtacatgacgccggggtttagcggccttatcgcgctggatgatatcgacaagccggatgatatgttctcgaaggtgaagcgtgagaaaaaccacgtactactgaagaacaccattcgatcccgtcgagcgaagaagaagaagggcgacgaaacgccaatcctttccgtgcagcagcgattgcacgcgcaggatgccacctggttcatgatgagcggagggatggccatcgacttcgatcgcattgttattccggcgatggtaacgcgggaatatggcgaatcactccctgactggttgcgacctgagttcgagcgcgacgtgctttccggcccgtctgtggtcattgacggcgtggaatactggtcattttgggaggagaacgaatcaatcgagaacctggttgcgctacgcgaagccgatctttatacgttcctttcgcagtatcagcaggagccgatcgcccttggtggtaacgtgttcaagtcggagtggtggcgctattacggcgattcagacaaggcgcacgagccgcgcccggacaagttcgaatatacgttcatcacggcggacaccgcgcagaaggtcaaggagctaaacgactactccgtaatgtgctattggggcaagtaccgggatcgcgtctacttcattgacggaattcgcggaaaatgggaagcgccagatctccgcgtgcaggccgaagcattcatcaagcagtgctggcgtcggaacaaggagtgcggaaaccttcgccggatctacatcgaagacaaggcgagcggtacgggtctaatccaggatttaacgaaggcggtaaacggcatgggcgagatcgtcccggtgcagcgcgataaagataaagtcactcgcgccatggatgcgcaaccaatcatcaagggtgggcgtgtcgtgctgccggacaatcacccattcgttgcagagcttgaggcggagatgagcgcgtttacatatgacgattctcatccacacgatgatatttgcgacaacgtgtttgacgccgcaaacctggaaatgaacctgagcgacgatccggttgagcgaatgaaacgccttgcgggattgaaaaagctgggtcgctaatacataatgtgggcctgacggcccacacttaaacaaggttgaaatatgaataacattaagatggacgactataatcaaatctttaatggtggcgctggttatgcgtcaaccctcgcgtctatcgcggcaagatttggaacaatgtcgcaggttgaagagttctatcatgaaaacggcatggcgaagaaaatcgttgacgtgatcccggaagagatggtcgctcccggcttccagctaaacggcatttcagataacaccaagtttcaatcagaatgggacgggttaaatctggagccgcaaatcaccgatgctctttgctgggcgcggctgtatggtggctcctacgtcctggcgatggttaacgatggtcgcgcgttgacttcggcagcgaagcggggtaagccgctcgaatcgatcgttgtttacgaccatgattccgtttccgtagcagaggaggaaaccagcccacgaagcccacgattcggaaagcctaaaatgtacgaggtgaagccgctaaacggcgggcaaccgttcaaggtgcattatacccgtatgcactacatcgacggcgagcgagtaaccaacaaggtgcgcaagctaaataatggcgctggtggttcggtgctgaacaagtcgatgattgaagcgattcttgactacgactattcggaatatctggcaacgcagctactgaagcgcaagcagcagggcgtttggaaggcgaaaggcctggcgctaatctgcgacgacaaagaaggcgagtacgccgcccggttgcgcatggcgcaggttgatgctaattccggcgtcggcaacacgatcggcattgatgccaccgatgaagagtacaccgttatcaactctgatattactggcatccctgagttcctttccgccaaaatggatcggattgtcgccctgtcaggcattcatgagatcgtgctaaaaaacaaaaacactggtggcgtaagcgcaagccagaacacggcgctacagacgttctacaaactggttgaccgcaagcgcaatgacgattacaagccgctgttagaattcctgttacagttcatcgtaacggaggaggaatacagcgtcgagttcgaaccgttgtcgctgcctactgatgcggagaaagcggatatcttccagaagaacgccaacgcggctcgcggcctcgttaccgaccaggttattgacgccaacgaagcgcgtgatactctgtcggcgttgattcctgaactgaagctaaaaggcaacgctccgaagcagaaaaaacttccggatcgcgcctctggttcaggcagcacgcaaagcgcagagatcttaaacaacacggaggcggatgatgaaagttaacggcagaatcccaaactggcgttatcctgaagcaagcgagcgggatttgtcccgctccatgcaggacgcggtgacagaactcgtggtagagatgcgggatcgcttagatcgtctgaaatttgacgccactgcggaggaaatcagccaggcggaagacgatatcagcgaatcagccattacgttcttttcggtcgtaattgcggcgctttcctccattggattgaccatctatagattcaattctaaacagtggcttgcaattgcgatcgcggctggcgggcggaacaacgaatcagttatgcgcctgaaagaattcggcgctggtgggtatgaagactggtatcaggaatcgctaaataagtggcaggattccgccgaagcgtcgatcaggaagttagcaagcgatatcgttgctgactggacgacgaaagttagaaccgccaacaacattggcaagtctcgcaagcagatcgatgaaatcatcgaaggtcgatacgctatctatggtagttggtcgcgcaaccgggcaagcggaatcatcggaacttttaacagtatgttgatgatgcagcgcctaaaagatgctaaagtatcgcattacttttggttcgggatgatggacgaccgcgagcgcgagagccatatcaagctagaaggtaagcgacgccccgttaatggtgacggcattttccctggtgaagagtacggttgccgttgctgggcggttccagattttaacaatgtagaggtatcatgatgaaaagagttcaaaggttcgacacggtaaagatgaaggcccgattcgatgagaacggctttcttgttgatactccgatcgtggcgcgtatcggtgcgcagacgtaccagacgccaaccgggccgcgagtcgagttccgaccgcgttcggaggtgtttgacgcagaatcgctggcttcataccagggcaagccgatcactttgggtcataagatggtgaacgcgcagaacgcaaaaggcctggtcgttggctcgtgttccggcgctggcaaagaagaggggattggcgttcttgttccggtgatgatttacgacggcgagtcaatcgagcaagccaaaaagcgcgtagcggctgagttatcagtgggctacacttcggtcgatatcgatcgcaaaggttggggcaataacgcaactggcgaatattatttcgacgaagacctaccggaaaacttcgaagagatgaaaaatgattccgtctctgattgggttcgctttgatgcagtgcaaacgaagattcgcgtgaatcacgtcgcgcttgttttccgtggtcgtgccgggattgcgaaattaaatcttgatagcgaacaagaattcccctatgatgacgactcaaaccacaaaggagctaaaacaatgatcattaaaattgacggcgtagatgttgaagtggccgataacgtaggcgcttacattgccaaactagacgcgcaagttgcatcggcaaccagtcaggtaactagcatcaccgcagagcgtgacgcgcttcaggccaaagttgatggcattgaagatgaagttgccgcccgcgttgctaaaatcaaagccgacgaagacgcaaaacagaaagttatcgcggtggtttctgccgctggcgtcaagtgcgacggcctggatgttaaggcgatgaaggttgcttacatcaaagaggtagacggtcgtgatctgtctgacaaagaagattcgtacatcgacgcttcttttgactttatcgccaactctgataagatggctggcaatcgctccaaagtcttcggcaaaaaagaagatggcgagcaaaaagacaaaggcggcttaccgaaacttgacggcaccgaaatcatcgatccgcaggcaaaattccgccgctaataatttgcggccttcgggccgctaccagaccaaataaacaggagattcaaaatggcacagattccagcttcttattcccgcaagcgtgatattgcagtagcggggcagatcgctgatacgtcactttacaatatcgacggcacttgcgttgctgaaggcgatatcaaagctggcgtactggtggcttccactggcgcggtttccaacggccacaaggtcgttaagccagcgaccgcagcgagcgacgttattgtaggtatcgcgcagttctcgcaagcctactcgcctgaaggcaagtatgacgatgagagcgcggttaacgttatgactcatggccgcatttgggcgatcgctgacgcaactgttactgaagcagattgcgcgttcggttctttcgttacctttaccgcgactggcaccgtagcgaagggtgatgccggggttatcaaaactggctacaaacacactggcgaatacaccaaaaacgcagatggcactgttctggtgaaagttcaggtgcttcagggcgcggttgctccggcggctgcggctggcgacgctggcgtataaagtaaggggcttcggccccatttttgcaccagaaaaaaacctttgacggcttaacgattcgtgatattcttcatctcgttaagccaaatacacaaacaggagtttttcagatgactatgaaattagatgcattcgaacagagtgcaattaaggtcgcaatgcagggcatgggcgtcgacgccgcaaaactggatgcttacggtatctggactgttaagcagatgactcaattactgaatcgccagtatgagcaggcatacccgcagaccagcgcacttgagcttttcccggtaactaccgagatctcaccgaccgcccgccgctttgagtggctcgaattcgatggcgtaacttctgcgaaaattatcgccgattacaccgacgacctgccgaccgttgaggcgatggcgcaagagaaatcagggaaagttttccgcctgggtaacgcgtggtttatttccatcgacgaaattaaaaccggggcagcgctgggttccagcctgagcgaccgcaaagcaactctggcccgcgaaggtcatgaaacgctcgttaacgatctggtgttcaaaggttcggcacctcatggcatcgtgagcatcttcgaccagccgaacattaaccgcatgaccgcttccgccgcttggggcgatgacgcagcagcggctgaaaaggcattcgaagatctggaagacctgcttaacatgatcgaagaaaccacgctgggccgccatcacgcgaccaacatcgtgattcctccgtctaagcgtcgtcttctgacgaaaaagatgccggacactagcggcgactcttatctgacctggttcaccaagaaccatccgggcatcaccattacggcgatggcggagctggaagatattgacggcgcaggcaccaaaggcgtgctggcatacgaaaaagacccaatgaacatgagcatcgagatccctgagcggttcaacatgctgccgatgcagccgaaagacctgcatttcaaagttccgtgcacctccaaatgcactggtctcatcgtgtaccgcccgctgactattgcgattctcaccgggatttaatcaaaaagcgccttcgggcgcttttttattgcattgcattctacaatgtgctttaatttgaaacctaaagtaaaccaatggagcattaacaatggccagtaaaaaagaaaccgtagaaaccgcagaaatcaccaatgcagcacaggagtcgcaggttgttcaactgcaaaacgttggtgcatgtgcaattcgctataaaggcaaaaattacgtctatgagcaggtttttgaagtgccagaaagcgagatcgaccgcttccgccacgaaatcttcaaaggccgcgtcgagttctacgacaatccgaaacgcacgcgcgaatacatcgcagcggtgaaggcgacagcgaaagagatcgtgcagcctaaaagcgcggaataacaaaaaccaacaaagggcgcttcggcgtcctttttcatatcaggagatcgaccatgagttacacaattcaagatgtgatcgataaaatgcgcagccttgcacctccgcttaaagaggttccagatgaactgctgtctgcgtgggttgtgcttgccgaagagttcgtttgcaaatccaggttcggggattccatcgttacggcgatcgcattgatgaccatgcacctaatgtttttggatggcgcgatgaagcaagaaggcgaaagcctggagtcttacacgcagcgagtggcatcgttcaccctgaccggggagttttcccaaaccttcgatcgcgtatcggcgtcaagcgacaacgaaatgctttctacgccgtggggcaaaatgtactggcgtatgctcaagatgcgcggcggtggcttcggccttcttaccgctggcaacgttcggcgttgcggagttgggaggtaatcgcaatggactacaaagcaatccaggctcgcgcaagcgcgggcattaagttcttcagcgacgctgacggcgtgttcaacaagtatacgaaaggcgctggcggtggcatcgatccggaaaccggggaagatatcattcctggcgaggtggtaacgacaatcaaaggcgcgatcagggatgtaaatgaccgtgacattaacggcgaaaccatccttgctggcgataagcgcggttttttcactcatgatgtgccaatcatggagggtgacgaaatcgaagtagacggcgagcgctaccgcgtggttaatgcccgcccggtaaaaccaacgggaaccgtcgttgcctaccgtccagttttgcgcagggtggcgacttatggctaattacactatccgtgaattcacaggcgcaattgatgcgtggtgtaaggccgctggtgatgcgctggaggacgttgtaaggtttacgtgtgaagatattcaccgcgaccttgtaatgcgttctccggtggatacagggcgcttccgtggtaactggcaaatcacctttaacagcgccccgctatacgcgattaacgcatacgaccaaacgggcgagaagacaatccagaacggtaacgccaacattgcactattcgcaaaaggagccgggatcacttcgatctggttcagtaacatgctaatctatgcgaacgcgctggaatacggccattcaaagcaggctcccaatggcgttatgggcgttgttgcgatccggttgggagtttatgttactgaggcaatcaagcgagcgagggcgaaaaatgcattatgatatggcgttaaaatgcaaggcggcagtggctaaatttgccgccgagaacgggttgagagtcgcgggggataacgttgactttatcccaccgagaggcggggaaacctaccttaaagcctcctacgtcgaggcggattcaagatcggttgacctgtcaaggaaatgccgagtctatctggcgatggttcagattgacgttatctttaagcctgggatcggaaccgaccgcgcgaggattatcgcccaacgcgttgcaaaatccttccctgaaggaaagattgttgatcgtgacggtaagttatatgtgagcgagtgggcggaggtacacggcgtgcagaagcatgaggctggttggttctttccggttcggttcacagtaagatgcgatagcgtggaggaaaacggttatccatcaacctgaccgatcttataggtgcttataatttcttgccagcctggaaatatataggcataatggcgttgttaaactttcatcaaaacaggagtattcaacatgcatttaccaaacggtgcaaaggtcttctttgagaaggctcgcggtgcggagattccgtttaccgcaatgaccaacgacgcgaaaaacccaaaaatcacagtggcggacggcaagctgaaggtgaaagatattgtgatcttcaccgattgcacctggggcgacttcgttaacaaggtggctcgcgtaaaagcagtgacggcaggcgtggcaacgctggaagagttcgatacctccgacgctaacaagtatcctggcggcgcggccactggtaacgtgatcgtgatcactgattgggtcgaattgccttgcattcaggatttaggcaaagacggcaacgaacagcagttctataactatcagtgcttgggcgatgagcgcgaacaatccgaacctacttacaagtcggcggtgacgcttaactacacgtttgcgcacgattacggtaacgcgatctacccgatcttgcgttcagccgacgccagcaagcaggtgaaagcgatgtacatgtatatcccgcgagcctccgaagttcgctactggtctggagttgcatctttcgatgacattccatccacggcggttaacgagatggaaaccgtaacgcttaacgttgcgcttaaaggttctcacgtcttccttccggttgtcgcgtaattaaatggcggggcttgtgcctcgcctttttttgtgcataatagcgaataacacaaaccaatcaggagttaacaaaatggccaagttcaaaattcaaatcggcggcaatctcccttctttcaaactgcccgtaactttcacttgcccggacggcaaagaagcaacaatcactatgaccgtaaaacaccgctccaccgatgagatgaaagacttctatgagagcgaagataaagcgccaaagggtaacgccgagtttatccgattcatggctgaaggctgggatcttgatgatgagttcaacgacgaaaacatttcctggctttgctcgcacttcccggcgtttgtcatggcgctgccgcaaacttacatggccgcgctcgcgggccaccgtgcaaaagtttaaggcgggctgtttatctcacgcttcagcctgagctaaccgatcgccagcttgcggagtacgggttaaggcgatcggactatgaagcagatcttgaaacgatctattttgatgaacagaccgcccaaagctggcagctattccaggccatgcaaacgcaatggcgaatcgggatgaatggcccgacggggcttgactataatacgttgccactgctgttcgaattgtataaaatcgacaatcgagaagcggcattacttgacttgcaaatcctagagggtgaatacctgaaggagatttacaagaaatcaaaataagcgcctacgggcgcttttttcatatgggggctaaacatggctgataaagtagctgggttgacgtttggcgttgacgtttcgcaggttgacaaagcggtacgatcactcgcagaactgaaaaaccaaagccagcaaacgggcgctggcctacagtcacttgcggacgctgaaaggcgggccactgcgcagactgaggaaatgaaccgcgcgttgcggcggcagaagcaagagacggacaaatcaaaaaccagctttagcaggatcgcaagcgccatcgatcccacgatctcaaaaatggccaacttgcgcaaagcgacggaagaacttgataaagcatgggctttggggcttgttccagataaggaatttttccgcctgggagccatcattgaatccacgaccaacaagctacggcagcagcaggcggcgctaaccgaagaaggtcgcgcagcaatcgcagaggcggaggcaaagcagaaggcggcaaacgccgggcgtgattttgtcgccagtctgaagcagcaggctgactccatcgggaaaacacgcgccgaactgctggaaatgaaggcggcgcaattgggcgtgtcggcagaagcggccccgttcattaatgccctgaagcagcaagagcaggcgttaaagaaacagcaaaacgctatgggcctcgctggcatttctgccgggcaatataaaatggccatgcgccaacttccggcgcagattactgacgttgtaacgtcgctcgcttcaggtatgccaatctggctggttgctgtgcagcagggcgggcaaatcaaggatagcttcggcggcttgagcaatacgtttaaggtgttgttgagctacatcaacccgctaacggttggtgctgcgtcgttgggtatcgcgctggcagcaatcgctaaagctggttatgactcctggagtgcgcaacgagaactggcgaatgcgctggtgctgactggtggctatgctgcgaccaccaccgggcagatcacagccttaaccgaagagattaacaaaaactcatcggctacgattggcagcattcaggaaatcgcaacatcgctcgctagttctggtaagtacacaatcaaccagattaagcagatcacgaagactacggcggaatggtcggcgcagacgggtgagagcgagaagacgatcacagggtattttgattcgatcgtaaaagaccctgttaaggggcttgccgatctcaatgagcgttttaattttctgaaagagggccagctaacctacatcgaatctttgcgtaaaaccaaaggcgagacggcagcagcagatgcggcgacaaaactgtttgctgaaacgatggataagcgccttaaagatatcgcggacagcgcaacgccgctcgaaacgatgtggacggatatcaaaaaatgggccgctgactcatggaaatgggtaggcgatcacacggtcggggcgctaaaccttatcgttgatacggtttccgcgatcattaacacgatcaggaagctgattgccgacggcgacgccatgatcgcgcagtttatcgttgacgctggccgacagctacagaaaatccccggcatgggagactttgggaatgattttctggagcagcaggagcagttaatcaaggactcgaaagccaaatccgccgagcttgcaaaaaccattgctgaacagcaggcaaggatcgctaaaggagagatggggtacattgacgccgcgaaggataaaaccctttccggtgggtacagcagcaaaacgaaggaacgcgtaaatcaggaagaaaaggatatcctgaaaaaccgcaacgccaggaagcagcaggcagacgcgggcgtaaaaattgatgagcagtaccaggctgaactgctatcgctacaggcgcagctaaaggttttgcagcagcataaagggcttgacgacaagatcagccagcagcgcaaagactacttcgagacggtcgccaaattccaggttttggaagaggcaagccagaagcgaaaactgacccaaagcgaacagcagatgctggcgaacaaaaagaatatcctgtacatggcggaacaaaaggccatcgtgggggatcagattgttcagcagcagcgactgaacgccttgcttgacaagtctaccaagtatcaaaaccagatggcggagaaaaccaaagcgctacaggataccgccggaatgggtagcaaggagcaggagagataccgggccaatgcgcagatggcggctgactggaaaaacagcggcggatctttaagtgaccctggatttaaagccatgcaggatgcaagcaataaattctacgcacagcaagatgcgcaaatgatgaactggaaggccgggtttactcacgcgtgggctgacattggcgacgaagttaatgacgtatacaccaacatcggggatattactaaaaacgcatttagcggaatggcgagcgtgctgactgattttgtcatgactggtaaggccagctttagcgactttgcaaagagcgtgatcactgacattaccaacatgcttatcaagatggcgctgtttaactcgctttctgctgcgtttggtggtggtggcggcacgttcagcttcgccaacatgttcagcaagggattttccggcggtggttacactggcgacggcgggaagtatgagccaaaaggcgttgttcacggcggggaattcgtattcaccaaagaggcgacgcaaaggttaggcccggaaaacctgtaccgactcatgcgcggctatgcaagtggcggcctggttggcggtaacgcaagttcaggatctggagtaaccaacggcggcaatgttgcggcgtcggctgcgatggtgttcactatcggtgacattaacattacgatgggttccggtcaggatagtaagggcatggagcaaggcgtgaggcagatcgtgaacgatatgttcaccgaggctttgagccaaaacgggcgcattgcgaagttcgtcaatgagaaaacgaggaggtagtagtggattcctttaaatggtgtacacaaattcaaggaggggcggcaaaggtcgccatctccaacaacattcgatcgattgttttcggaaacggctacatccaaacggcatcgagcggaattaacacgaagcgcaggacggttccgatcgtttatggaggttcagattgggaggaggtttataacttctgtcaggatcacgtaacaaagccttttgtgtggaaggcaccggatggaagaatgggcgtattcgtcgtaactgccgactccgttaaccttgcgccgcaggggggcggggtgtttgaggtaacggctgaattcgccgaacgcttcacttcagccggataatcaaaaagcgccctttacgggtgcttttttttggcctatgatctggagtcaattagaggagggcttacgatgacagccaatgtttcaaaagagtttgcgaactgcttacaaaaacttttccccggcgagatcctaacgctgattgatatcgacgccacaaagttcggcgggcaggtctaccgattccataacgagaacgtcgcctatacaaccgaggagcttttagcagcggtaaacggcgggacgcttcagccaaagatgatcacgtttcgcggcgagcagtacggcccgcgcccgttcggcctgggcgggatcgcaatgtctagcgatggcacagtggaaaagccaacgctgacggttagcaatattgatgcgcaagcgagtgctcttattcgcgcctataacggccttatgcaagccaaagttacggtatgggttttggtcaaggaattgctacaaaacgacggcagcgttaaagagggcgattttaggcgatttgtctactacatcgagcgcccaaaacaggtcgacccgcaaaaggcaacgttcgaattaacatccgtgtttgatatggatggattaatgatcccggcacgcctaacgcaaaccgtttgttattgggcgcagcgtgggtggtataagtcaggcaacggctgcgactacaacgggcagaatggatacttcgacaagttaggaaacagggttgacgacccgtcgcaagatgtttgcggcggtctggtttcttcttgcaggcttcgttttggtaatgagccgttgagtttcggcggttgtgcgacagcaacgttaaagagtggtagctaatatgttaaccccaaaaatcaaaatgcagatcatgcagcacgcgaaggaagtctacccgcacgaatgcgccgggctggtaacgcaaaaatcacgcgtgcagaaatatcaccgactagacaacgtttctccggatcctgagaacgaatcaatgccggatgaaacgcagtatgcgatggcggcaatggatggcgagcctatcgccttcgttcactcccacactggcgacggggcaaccaccgttccgagcgccacagatttatgcttctgtgatgaatctggcttgtcgtgggttatcgtctccatcccggaaggcgatatgcgaatcattgagccgaagcgccgcccgctgattggtcgaccctgggcgctgggggcttacgattgctatggccttattatggattttcacaagcgccacggcgtaacgctaaaagatcggcgggttccgttcgaatggtggaagccggaatacaaagagaatctttaccaggactactggcaagaggacgggttcattgaaaacactggcgagcctgaagttggcgatatgatcatttttcagcttcaggcggagaagtggaatcacgcggggatttacgttggaaataacaacatccttcatcacgcatatggcaagctgtctcgccgggatatctattctggatggtacgagcagcacaaggttttaatttgcaggcataaggagctaaaacatggcatcacatacaaagacgattaaactatctggttccctgggccgtcggttcggcgtcttccacaaacttgcggttgattcagtcgctgaatgtatccgggcgctgtcttaccaggttgaagggtttaagccgttcatgcagagcaaagttggttcaaacatgcgcttcggcatcatcgcggacggaaaaccaatcagcacggacgactttgctactttcgccgtggcaagggagatcagaatcatcccgatcccaagagccagaaagaacggcgggttgttgcaggtcgttatcggagcggcgattatggttgcagccttctttactggcggcggttcgctggcggccatgggcgctttttcgtcggcggcttttatggctggcggctcaatggttttgggtggcgtaatgcagatgatcgcaccgcagatgggcggcaacatgcgggcgagcgaatcgcctgagaataagccatcgtatgcgttcggcgggccgattaataccacggcggctggttatccaatccagttgccatacggttacagattggctggcggcgcgttgttcggttcgggatcttacgcagaagacaacaactaattaagccattcgctttttagcctgggggcatagcctccgggctttttgtcgtgtacaattgcgagactattaacaggaggctaaacgatgactaatatcaaggcccgcaagggtggttcaagcaagccacgtactcccgtagaaatgccagataacctgatctcaaaagataagatcaagttgttgcttgccgtttcggatggcgaggtggttaacgacttcagcctgaagcagttgcattttggcggcgtcccggttcagaacgaggatggaacattcaactatgagggcgtgattgcagagttccgccccggcacgcaaacgcaggactacattcagggcttcagcgagtcaagtgctgaattccaggttgctcgtgaagtaactcacaacacgccttatacgcttaccgtatcgaacaaaaatctttctgctattcgctttcgcctgttatggccgcgcgtgctgactcaaaaagataacggcgatatggtcggatcggttgttgagtacaagatcgagatggcggtagatggtgcaagttatcagacctacctaactggcaagattgacggtaagaacacgactggcggttacgatcggagcattcgcgttaacctgccgcaaaacttcacgtcgcaggtgcttatccgcgttagtcgagtaacgccggacgctgacggggtgaaagtcgtcgacgctttccgggttgaatcctacgctgaagttattgatgcaaaattccgctacccgttaacggccatgctttacgttgagttcgatagcgatctgttccagaaccagatccccactatctcactcaaaaagaaatggaagattatccatgttccgagaaactacgatccgattaatcgcacgtactccggaacgtgggacggaactttcaaatgggcgtggagcaataacccggcatgggtgctttatgacctgatcatgaatcagcgctatggtttagaccagcgcgaacttggcatcccggttgataagtggtcgctgtacgaggtggcgcaatactgtgatgagcttgtgccggacaatcgcggcgggatggaaccgcgctatttgatggatgtagttgttcagtcgcaagttgaggcgttccagttggtaagggatatttgttccgcgttccgtggaatgacgttctacaacggtgaaagcctttcgattatcgtcgataagccgcgcgatccggtgtacctgtttacggctgataacgtcgttgacggcgtgttcgttcggacgttcccaagcgaaaagacgatgtacacgtcgtgcaacgtcatgttcgacgacgaagaaaaccagtatgaacaggatgttgaaccagtgtttaaccctgatgcagccatgcgatttggccacaacccaacgagcattacagcgatcgggtgtaccagaaggacggaggcgaaccgccgtgggcgctggattctgcaaacgaacctaagcgccacaaccgtttcgttttctactggtctggaaggcatgattccttcttgcggcgatgtaatttacgttgcagatccgcactggcaatcggcctttaacctggtgctatcaggccgcgttatggaagtatctggcgtgcaagtgttccttgcctaccgctgcgacgcgaaggctggcgacactctgatcctgaataccgacgacggcaagccagtgcgccgcacaatcgccaacgtttcggcggatggtaagaccctcacgctaaacgttgggtataactttgacgttgcgcctgacagcgtattcctgatcgaaagtgatcagcttgcagcggaacagtatgtagtaaccagaatcgaaaaaggcagcgatgatgacgagttcacatttgccatcacggctacgcagtacgacccgaacaagtatgacgcgatcgacaatggggtaattaccgatggccgaccaacttcggttgtcgacccggattcaatgggcgctccgaaagacttaacgattagctcgttttctcgcattgttcagggaatgagcgtcgagacgatggtgatcggctggtctgccgtgcagtatgcaaaactgtacgaggtgcaatggcgcaaggatggaggtaactggaacaacgttccgcgcactgcgacaacgcaggttgatattgaaggcatctatgctggcgagtatcaggcccgcgttaggtgcattagcggcgggaatgtagcgtctccgtggtctgcattggcaaccgccacactgaccgggaaagtcggagcgccaaaaggcccgattaacctttttgcgtcggataatgagatcttcggcattcgcgttaagtgggccatgccagaaggggcggaagacacggcatacattgagctttaccagtcgcaaagcggaaccgatcaggacgcaagcctgcttacactgattccttacccggcggctgaatactggcattcaattttgcccgctggatatgtgaactggtataaggcgcgaagtgtcgacaggatcggcaacgtttcaccctggactgattacgctcgcggtatgtcttcgactgacgttaacatcatcacagatgcgatcctggatgagatcctcgatagcgacgcgatgaaggagctacaggaaagcgcacaggatagcgcgtcaagactgagcgactacgcgaacagcatcattcaaaacgctttggcaaatgatgcagacgttaggaaaatgacgaaggagaacgggaagcggaaggcagagattgcgcatacgacagtccttatcgccaacgaatcagaagcgagggcggctgaaattacggagcttaaaacgcagattgatgaagatatcacatcgcagattacgatccttaatgaagcgctggcggatgagagcgaaacgagggcaacgcaaattaaccaattgcaaactcaattcggcgatgatatggccgcagggtttacacaggttaatcaagcaattgcaaacgagagcgaggcgcgagcaaactctgaagcggcactggatgccaagatcgggcaaaactccgcagcgctagatcagaaactcgactcgtgggcaaacgttaatggcgtcggttccatgtacacgatgaagttaggtctgaagtataacgggaaggaatataattccgggatggcgttacagcttaccgcacaaggaaataacgttgtttcgcaagtgctgtttattgccgatagatttgctatcatccgcaatgcggaatccggcgcttacacgcttccgtttgttgtgcagaatgaccaggtgttcatgaataacgctcttattcaggatggttcgattaccaacgccaagatcggacagtatatccagtccaacaacttcatttctggccagcaggggtggatgattaacaagaatggtggttctgaattcaataacgttgtcgttcgtggcgcactgtttgctgcgtctggtaacttcggctttgacggaggtaacggtgttgtaatcaatggtaatggtgtcacggttaacttagacggtggcgggagaattgttttagggaggttctaatatggcaagcggtttactaatcgatcttaatgatggtaatccggtgatgcaaattacggcgggtatgcgttgcccgtctttttgcaacctggtaagtaacacatgggatgaaaaaatagtcaatattgatggctacgttcctggatctcaaattgtcgttatcccgcgcgatcctgtatcaatccaaaataggggtacaaaccttgtaccaactatcgggatgcaaagtggttactcgcagaacggatcgcaacttactttttctacgtggtggtctgataattgggggcgcgatcgactttatgatttaacaatctgtcaaatccttccctcctccacagggcaagggttgtttattgccgattccaccgactttaccgcaatccccgactcaacaagggccgggttttgcgtttgggccggaacgatcacgtttacagggcaatggcgaactccagataccggatacgaccgcaataagtatatggtgtttgctcgctggagcgccgacggcgtgacggtagaatatgacggaaacaacatctacgccaggaatgaaacgaacggcgaggagggagacgctacagttacaatgagggtggctattttcgccagcggagttgctccacaggcgggaaccggattgaactttttcaacgcggctggccaatgcacattctccacggttcgccgtccgtttatcttcaggaaccgattctataacccgtcgtgggattatcaggatatcggcgagggaatgattttgcttggcaggtatggattcagaagccgggtaagtggagatcgatgcagggcaaaatttgccgggttaatgatgagcgggaacagcgtaagatgtgccagcggcatcacaaaatcaaactggacgtcaagatatagcgtcgtccaggatcgattggtcggcatgagtgtacccattattgaaaacatgtattaaaagaaaggggccgtatggcccctttttttacatccctaatttatcctcaagtgcggataaccgcgcttcgataccccttgcaatgaacaggtttaattggtcatatctgaagctgtaacgatccccggcctcctttttacccataattggagtaacgtcgtcctcataaccaataatgatatcttcctcttcccattcgtcatggcaaatgaacccatagtgcataggatccagtccgcaagattccatgatctcgatggcgcgctgaacggtcaggccgatgtgctcgcgagcattctcgccttccgcaacctgtttagcaagccatgagtaaatgccaatctcctgagataacagcttcgcggctgcgatctcgttatcggtaaacttgcgaacttctgacttcagtcgagcgtcggaagtctggatcgccccgtttgctgcgtacacggcagaaacacgcatagatgagttgccgatcgagtatgcattgtccgccccagggtacataatgccagcgttgctaatgttccaacggtctaccctattggttgttcctactgccgttgttgagaacgtgatcccggcaccagttgcagttgctgagaatccctctgacggggcaaatcgaatgctggccttcagaccaacccaatcattaccatcgtgcccaccaaagccgacatagaacgcatctcctaactgcgacgaaccgcgagaactaagtgtgccattacatgagtttccgcgaataacagtgcttgaggtgctaccattgcgcggggtgattaaattcaactcatttgatgagttgttaatctgcttcaggccgcgaccattccaactaagcggctccgatgcccctgaagaaatgccttccattttgtacgttcccattggaacatcatagccgatccacaaatcaccgttattgctggtggcaaacgtctgccgacgattatccatcgtttcattaagcggggtggttaacagtctgaaccagccgccgtggttagtcgctgaacaagttccatcctgtaagaagtgctgagaaacgttggagtgttctgtatatgctgaaccatcccacggacgcgaaccataaccaccaattaactgaccgtttgagcttgcagcattgttggcgccgcgagtgtagttgtggaatacagcagatccgccagcagtattctcaatcccgaaagagcattcagttgcgttatcaccaatgaagttaaccccaatcccgttagtggccgtcgtctccttcagtggcagcttctgcgtcgacgtaacatcaacgccgccgcgaaggttagatgcaccattgacgcgtagcgtgcttaacatcgtaaccgcattgctgaaagtggcattcaacccggttactgtaaagtttgccgcgtcaaaaacaacctgcttcgcgctgttcatatcgccattcgggcggaagtacattccttgaccgtcttccgggatggagtaaacgatcgcgttgttgttattggcccgaactacggcaccgttcagggttagcgtggcattaccaccagggacggagatcgcttgcggctggctgaacgtgttagctacgttggtgcgcggaatcgtgctatcgttagccatcaaataataagatggtgaattatatacaatcccttctggctccgtggtaatccacgaataaccagtgcgatcgataatcggccctgtaatatatgagtttacggcctggatgtttacgcgattcagccacaggttaggaatccatccactcggagcatgtagataaacatcaaatgagaagtctgcgttcttcaccaccccaagattaatgcgcggagcatttggccttgccgcaaccaaagagcgctgcgtaaaccaagtgtcaatattatcgcttgtcaaaggtgaagctggaaggccacgcccagaaagcgaaaagatatcaaccgggacgtttgcggatccataaccagaacctccgccgacgataaactgagcaaaagcgtaagacgaaccggcgctcttaatattggcgatcttcatccatgcccgcgagccgcctggcgaagtaggcagcttatccggagcttgaacgccagtcacaagatctacagtctggttatagaggttttctgtctgccccttcgctgtttgcgcgtcggtcttcgcggagttggccgcattctctgacgcctttgcattagtctccgaggtcttcgctgcggtttctgacgcagcagccgccgacgcgcttgcgtccgccgcttcggtatccgcccttacctgatcggcaagactttgcagagcttcgaaatcgaagttcttaaagaagtcgacagcatccgcaatttgagtttcttgcgactggtagtagcgcagagtttccgcaacatcttgcgccagtccgtcaacggtcagcgagtcgcttaacaggatcgcgtaatcgctagacgctacgacagcgccttttgtggtgatggctttaatttcagtatcgctaaccaccttgttcacgacggccatttgaatcggtgacgacaaaaacataatcgtcgcgccggggcgaatcagcgaaagcgaagattgccattttgtgccagtcccggtaacagttccgtctgcggccatagccgctttgccttctctgtatagtgccattttaaaagcctcttatgttgattgagtaacgcagataatagcatcaatgaacagataaaaaaaggagcctttcggctcctttagttgtcaaattagaacgggatatcatcatcgaaatccatccccgtattcccgccgctgttttgcggtttaggcgcttgttgcggcttgggttgttgaggctggccccacccggattgctgattgccgccgccgctttgcgaaggctcgcgctggctgaattcgagttgcggcatgatcatttcattgtggctgtaaattgtgccgttgtgctcgcggttaacgatctgaagcgtccggcaggtgacgctgatcaccttattcatttgaagcgcttcatcgtaccacttaatcatgctttcttttgcaaagaaaacggcgcggtagttcgtgtaaattgtttcgtcctcgccatcacgattgcggatcttcattcgctccgacaggtctacggcgtacattttccacggcccgttattattgctgccttccttgatgtacggttcttttcggatcacacctgttacaacatgcattgtcgttcctatggggcggtttcccgcccggttaaattagttgaaagatgaaatatcttgtgcttctggttcaggttttgattctaccttttccggctcacgtttcgcaacctcttgcggtttaccaggattgaagccgttcgccggggtgactttcagttctgcctggcgtttggtgatatcgtcttccgtcattttccattccgcaggcgttaacgtttgtttcgccatcttatagatctcccgaagcgattcgagatcttcgcacgcgtcaatgcgttttttgaagtctttcggcgtcattttcgtaatttctgcatcatcatccgcctgcttgatgccgagcgctgcggccagtgcatagcggcgggcgtaagatgttgttgaaccgtatgcttgttcgactgttttgctgatcggcatattgtactgaaacgccatgaactcgccgctttcatgcagaaacatcgtttcgaggtgcataaccttttcggtgctggtatccatcatggattgaatgaccataattttattcttctccagcgccggggaaatcgcgtcgaggatatcaccaagattcgcataggtgttcccaagatggttgttcttcccgcttttctttgcggccacgaagccagattttgccttgattaatgcggctgcaatggtggtgaatttttcagatgtacgcatgataaagtttccttttcctgattggtattgcgcactatatcacaagcgcgcaccagtgtttagctatttgtgccgtatacgtccgggaacatgtatttcacaaactgcggagtaggcaaaacgacttccgccgcgtttgactcatatgatggccatgaatcatgcttcacgcattccgcatactgatgaatcacgctttgatactgcttgcgaccgatctcgatctgctggctggtcagggtgaacgccagcggagcaaacggtgattttttctcctgcgttagcagtctgacaactaccgggcgtttttcgttgtaagtcttcacaaacagatcgcgctgcaatgccatcttgagatagtagcccaagttgaaggctagtcgcccgaaatcgtcaggcttggaagattgcgtggttttgtagtcggtaatcaccacgacctcgaaaacatcatcagggttgaacccccactccttgatgagttctggatcggaaaccacgtcaacatgatcgagtcgaactttgaccttgacgccgaagatctcgccgaagattgacaattcacgctgtgcggtaggcgattcgatacatgcggcgtgtcgcgggttggccaacatcacgcttcgcatttgaacaacggcatcgaaatcaacatccttaaccagcttgcgcccggagttcatcgcggcgctttcgtcgcaaagttcaatcgcccaccaaacatttacgtcaatccctgcgcgatatgccatttccagaagttccgggtaatccttgttggacgtcccaatcaggccacacgctttcagcttcgcagacagtgccgacttcgacgtaatcagatctttaacctcgcccggagaagtcgcccgcaggtactcgccattaaattttgccgtctcaagcatacatgtatgcgaacaggttccgaacgccagcgcggctgtttcctcacgcgccttgtatttccagtgcgccggggatgttgcgtaaatctcgccgaggcttgagccgctaacgtactccgcgcaccatgagttaggatcgtgatattgctcgttagtcaattcactgctggtgtatgccctgaaaattgcttcagccattgatattgctccatttgtggtttcgttgcgttaagtatacgcatgacgattcacggcgcaagtcaaaaagtgctatccgtagttggttaaaaaatgagcgaaatttacgtaagatttagtaagatgcatcttacgtgatttttcctatatatttcatcgagttaatgcaaataggtaagatggtaagatccctataggtaaatatccatgaaaaatctggcgcgaaatccagcgaaaaaagacacgcaccccggagaaatcttaccaagataagtatagagagatataacaataataataatattattatttatcatatacttactatctatatattgcggttaattggttaaattttgcgcgaaatttacgtaagattcatcttactaaatcttacctaaagtggttcgaccagttgcaagccactgaatttcaggcataaaaaaggtaagactgattttctcaatcttacctaaattctggtcaatatttaatcagagaagagatgatgccttgtataacttacgctcaaagccgagcttgaagttgtcaccgttcggaacgataacctttagatccctatcgtcggcggccgccagcatatcccgatctccacgacggcaaactacccgcatttctcgcttaccttctccgcccttgcctttatacctgtacgccacgatctcgacgtttgaaggtatgatgcaggcccaaacgtcgcacttgaacgaactggcaatattgaagtgcatcgcctcaatccaggatcgagcaaggtaaatcggcccgttaccgtcgtcgctctgattggtcactatcaccgatccgaaggtcatatctccagctagcatcttctccctgccttcttcatcaatgaacaggatattgcaatactcatcatccggcccatcttcatgcacgagttgcatcggtagcgcgtgaattagctcctgtctgccgttctcgtgagtttttacgccaacctgatatgatttgatatgctcattttcaatgccctcataaagcgttacaggcgtgctatcgacggcctccgttctgtttaaaactgccagcactctttcatgatccgccatctttccgtagtcatacccgttatcacgagctacctgcttgtttctcttgaccacgtattcttgcggaaccttgccgagatagcgcccaagaatgttgatgcattcgctatacggctggccgcttaacttcattaaccagccgatccccttatcagcaccgcagccgccacagtatgctccgccgtcgccgcgcgtttctaacttgtcagtccagcggaatcggtctttgccgccgcagttcgggcagtcctgatgcttgccgttgaagtatcgagagtggatgccgcaaatgttctgcaacgcttcgcgccacatgccagccatgtacggcaaaacctctttttcatcgtaaaaatccacgtcgttacctccaaataaaaaacgcctacacgagaatgataacccggcaggcgtttagtgtttagacaaattgtgctatcggactacgcggagcatttcccggcggtcgcatcggcgcgtcactggctttccgttgctgtcaaaccttaaatctggtcggcagaatgaggcgcggaaacctttgcaattgttccggcggtagctcttgtgtacgagataagcgccatcggctgagatcatgccgcgcttacgccactgctgaacaacctggatgctaacccccaactcttttgccgttccagcgataccaccgaaggcatcaataaccagctccatccgcgcagtcaacccggcgcgaacctcatccttcagcacgtagtaaccagtcggtcgcttgcgtttcttcttatctttcccgcgcgatgttccgttattgccgttcaaggttcgcttatcaatctttgccatttgttccataatttaaccctcatagcattttttgttaaacctgataaaatgttccctgtattatacacgcaactatgcgaatgacaaattaggattgcccatgctcacaattgaacaacaaattgaagcctacgcagacaagatcccgttaatacaaaagcggttcaccgtcggaaatatagttccttacccgtatcaggcggttgcgtatattgagaccgcgaagcggatcgcaaaatatgaacatcctttttacattaaggcttcggtttccgccgggaaaaccatcatgatcgccatgctcgcggcgcagtgcaaggcaatgaacttacccatgatggttcttgctcgccaggccgagatcgtgaagcaggattccgaggagatcagtaacctcgatgttcccaactccgtttattgcgccgggttaggcacaaaggcggcatacttcccgatcgttgtcggatctgaagggacggtggttaatggcctgtttaaaatgcttggcgactacgtgccttcagttctggccattgacgaatgccaccaggttgactggcaagatctggcggaagctatcgccaacaatgaatcgttcgagtacatgagcaggccgaaagataagccgtatcgcgtgaacggggaattggtcgatgccgaccacccatacgacgaaaaattcgacgacgtagaattcggcggcggtcgcacgcagtacacgatcgtcatttgcgagttaatgcggaggtgccttgagaagacagggcgagaacttcgcatcgtcggttatacggggtcggagtttcgcggtgtggttcccatcttgcaggaagacaagacgcagcttggattctggcgcgagcagatcaccgacattaacacaaactatcttgtcgagttcggatcggttgttcccaccattttcggcgataccgaggcggatgggttagggtatgacctgtcagaattccacggttccagtcaggacggtacgcaggattttagcgcggaagaattgcgcaagatggaaaagaaaatccatgaatccggcgaaatgacgaagctgattatgcaaaaggtcgtggagcgtgcgaaaacccgaaacggcgttcttattacttgcgctggccagcggcattgcaaggaagcggcgagctatctaccgccggacgccacatacgcgatcatcaccgagaagaccaactcgaagaaacgcggcgaaattttggacaaggcgaatcgcggtgagattaaatacatcttccaggtgatggcccttaccactggcgttaacgttccgttttgggatttttcggtcatattgcgcaagatcgggtcgcttacgttgcttattcagcttttggggcgcggtatgcgactgctaaaagactggcaaaagcagccaccttactcgtgggtgaaggaagaccatttagtttgggacttcgccgggactatggacgatttgggccagctatatttcgatccgattcttgagcaggcgcaataccaaagacgcaagagcagcaagaacggcccgaaaatttgcccggtatgcaagggagaaaatagcgagtacgcccgccgatgcatccacaaagacagcaacggtaatcgttgcgaatacttctggatctcgcagcgctgcgaagaccagaaagacccgcgaacagggaagattaaggtaaaagggtgttacgctgaaaacgatattgttgctcgccagtgcagatgctgcggggtgcagcttaaagaccccaatgacaatctcaccgggaagcactatacgcaaaatgactggtatgatgttgtcgggttcgatatcggcttgactcgcaatcagtccgggatcatcttcaattacgtgttactgaaccatgacggcgatcgattcaccgcaagggaaaagttcttcccggaatcagagaatcagatttgcggcaagttgtggcggcaaaaggcagtcttccagcacgttagcgacgcggtaatgcgcggcaagctgggcgggatgaaaaatgcgcgaaaaatacttgagaatgcgcattacttccgagcgcctaagcgcgtaacgcatcgcgttaacggtaagaaggaagatattatttcacgcaaagattttggagacgaatagtgattactgataaaggtgattatctcgaatactacggcgggcctgtaaaggcttgcccgcttgagaaaatcgatcagatgaatagcgtttcgtggctgcggcacgaataccctgattatctgttctggcacacagtcaatgaaggcagcaagcacaaggcgagcgcggttatcgatcatcaaatggggttactgaagggcgttagcgacattctgatcctgattgggttcggcggcaaatacccgttcgcggccatcgagctaaagcgccagggcaaggcgcaggcgtcaccagtgagcaaggagcaaagggaattccttgctgccgtccggcgtcgcggcgggttcgccgccgtggcctatggcttcgagcaattcaagatcgctttctgcgatgccatcaaatagcactttttgttaaaaccgcccggcgaaagccgggtatcatttccacatcgaaacgaatcacggagaaacatcatgaaaactttattagtcgcaattgtagctgtaatcactttgtccggttgcacttcatcaccccgccccgatggctggtgcgcaacatcaacgcatggaatctgtgttgccaaatggaaaaacggcgtagttgttccggctggtgaagtagatgtgcgcttcgcgggccttgagaagaacggtaacgagatcagcggaaccgtaaccaccacaggtaaggaatggtagaatggcaaaagacaccaaagataaagacactcacgacgcgttcacgacgtttgaacagcttgaacgtgaaacgttcataggaaacgctcttgctactggcggacactatcaggctgtcaggcccgacaagttttaccaggtaacaggcaaccgatacgccgggagcaaaacgcctgatatcgtgcgcgataagtgggcgaccgatcgcagcctgatcgcatacatggaagagcgttatgggccttacgaccttgacgcggcggcagaccaaagcaacgcagtttgcccgaagttctacgacgaaaaaacggattgccttaaacgctggtggggaaaaaacaagcacgtttggctgaatccgccttactcgtttccagatccgtttattctcaaggccattgagcaaatggagcacgacaaccagatcgacattctgctacccggcgacaattctactgcctggttccgtgacgcgcagaagatggccgccgagattatctggattgttgccgatgttgaagaggatgatgacgggaaccagttaagccgatccggtcgcctcgccttcatcaacggattaagcgggaagccagtcgacaacaacaataagggaagtgttattttcatcatgcgcaagctcaagcagggagaggagcaaaagacgctttacattccggtaagcgagatttgcccttcattagctaaaaagcgtatgcgcaaacgtgggatctgaaaaatggaacagatagaatctttcaccgagtatcttcggatcgtggttgaattgctggacaaatacggcttcattgggacggatgaggaaaagttagcctttgctgacaccatcgacggaacctacatggagttcatggacaacggaacccctgtcgctgactggccagaaattcttgaacgagaattgattgagtttaaatcacatgaaggcgcggagtatttcgcaaaacagcactaattgctaaacaatacccgccgcgtgcgggtattattacaccatcaaccaatcaggagcaaacgccatgaaaaccaaaaccattgcagacaccatcaagatcgtaccagtaaaagcgcaagtagtatcgcgccacctggttaacctttctcgcctgtgcatggccgactacatggcgaacccttcagataatggccttgatggtgtggtcggtgagatttattttcgcgccgggtacggcctggaaagtgtggccatgtatgagcaaatggccgaatgtttttgcatttacggtgacgaatgatgattgtcgagactggtcgcgctgccgtatggcagcacgcaaaagaagctggaataagtgatgatatcgtgaagatcgcaaagtatttcgatatcaaagatatatcaattatttttggtgggaagctcacctatctacacgagcgcccggtgaagcgcacgcgaatagcagttgcaacgcgagaagaggcagacgcgctgaagatgttcatccacgagtctaagcagcagaagaaatattacaagtagcggggaagtgaagaatgcgatatattgcgatcttatttacggcgatcctgtttacgatcgcaatctttaactacgcaattcaattgggataaattatgcaacctaaaatcacagacgaggaatttttagccgcccgcgaggaaggcaagacctaccgcgagatcgcggaagagttcggaatgaacattcgaagcgttgaacgtcgcggcgttcgcctggcgcgacaggggcacctacacggaaacgcccacgttgcgaagcatatcccggacggcttcggcgtcaaaggcacgtcgacgatgattcgcgcggacggctccgaggtcgttcggtgggtcaagtcggaagtagaccgcgatcgcatggtcgcgcttatggaggcagcgcaggcggctttctgcgaagaccttccgcgagccgaaccgcaaccgctggatgaatcgaagttctacattgaagatcagcttgccctgtacccgatcttcgacttgcatatcggggcgatggcgcacaagcacgaatgcggcgagaactatgacaccagcacggctgagaaggttctaaaccgcttctttgattattctgtttcggtggctccgcaatcacaaaaggcggttttgttggtcggcggtgacttccttcacagtgacggcctggacgcagtaaccccggcaagcggtcacgttctcgatcaggacagccgatacgctaaacttgtttatgttgccattcgttcgctgcgtcgcgccgtgtcgctactgcttaacaatcatgcggaagttgaagtgcaggtgatcgaaggaaaccacgaccaggccgggatgatttggctacgcgcggcgctggcggcgttctatgagaatgaacctcgcgttttcgttgatgttagcccggcgatcctgcatcgcaccttgtggggcaaaaccatgctgggctatacgcatggccacacgatgaagaagcctgaaacgcgccttgctgcgatggctaccgacttccgtaaggagttcggccagtgcgactacatttacacgcattccggccactggcatcaccagaccgtaacggaacactcgttaggcattgacgaagtgcatggccagttaggcgcaaaagatgcctacgccgcacgcggcggatggcgttcataccgccaggctgcggtgattctgtacagcaaagaatatggcgaagtaggccgctttatctaccgcccgaacatgtaaccacaacggccccgcgaggggccaacaaggaaaaccgatgaatagaaatatctgcattttcgatctcgatggcacgctttccgacggaacccaccgcttgcacctgctgccgaaaaaagatctccaccttacagaaagttggagcgaatttaatggcgcgtcaattggagacagcccaatccaaagcactattgacgtggcgaatgcgctttatcgatccggaatgaccgttatcatcctgactggccgatccgatgaggtgaagaccgaaacaatgatttggcttgaccgctacggggtgaaatatgacagcctaatcatgcgccgcgccagcgataaccgtaaagacacggtaatcaaggaggaggagttacgcaaaatcggacttgatcgcattgttgcagcgtgggatgattcccccaatgttattgcgcacttgcgcggcctggggatcacgacttaccaggtatgcgactacggcgacaatcttcacgatcatttaaaatcacacggagtagacaaatgaaaaatgtaattatcctcaacggagcgccgggcatcggaaaggacactatcgcggaaatcatctcgcggaagtggcaatacaagaaccttagcttcaaacagccgatgtttgccattgctcgtgctgtgcttggatcggctgattttgcacgctttactgcccgataccacgaccgcaagcacaaagaagtgaaatgcgattttttgggcgaccgttctccgcgtgaattcatgattcacattagcgaaaatttcgtcaagccgaccatgggcaaaaatcagttcggcaagttgctttgcgattcggcgctaatttcgccgtttaactgcatcgtcagcgacggcggcttcgatgaggaggtggagcacgtcgcagcgcatgaggcgcttaacgtgtttgtcgtccgccttcatcgtgacagcatgacctttgagggtgatagccgcaagcatattcgacgcccggatcttatttgcgacacttaccatgaactcgattttgatatgaccactggcgagccggaagacgacgcacaaaaaatccttgatatggtgtcagatgttgcattaaaattataaagttaatgcctttattatcatcaccttaactattgggaaccttgatgggttcccttttttttgttcttaatttggcctaatgcatatatcatcaccttaccatttaactaacagaggttgcatatcatgcgagaattcatcaacgcggcaaccaatagcagcggtggcgttgccctcgcgggatctgcaaccgggcaattaatcattgctgccattggtttatttttcatgattctattcggctccttcggcgcgtggttgcgctggcgagactcaaaggcgcttcgtgaagcgctggaagccggggatatcaaaacggcgatgaagatcaggagtaaataacatggggattaaaacgcgggttacattcgcggctgcggtggcgatcgcggtcgcgttcctccccaaagtggaggacacgaaatacaaggtttatacggatatcgctggcgttccaactgtgtgcgaaggcatcacaggcccggacgttatcaaggggaaaacctatacccggtcagagtgcgacgcgcttttaaccaagcatatccaggtggcgaagcgaaccgttgacagcaaaatcaaagtcgatgttccggacaccttcagggcgtcgatgtacagctttacgttcaacgctggcggcggcgcatattctggcagcaccatgctgaaattaacgaaccagggccgattgcgcgaggcgtgcgagcagctatatcgctggacgtactaccgcaacccgaaaactggaaagatggagaagtcgaaaggcttgcataatcgccgggttcaggaatatcaactatgcattaaggatctgaaatgagcacattaaactttcaacgagcgctggccatcggctttatcgtgtgggcggctgccgtcgtttccggttgcgcgtcaagcgtcccaatcctttccgatctggttggtagcaagccggatatgacggcgcaagtcggcgcggagaacgtgaagcaggcggttggcgtgaccaacaaaacggacacctcaagcaagcaggagaccacgttcaaagagtcggcggtaggcaaggttgacacgtcgaacaagaaatccgtgacgacctccagcattcacgccaaccagatcacggcggacaagatcgagatccggaatgatgaaagcggaagcctgattccgtggctgattggtggtgttggggtggtaatgctggcgatcggggtgttcggtctttggcgggaacgaaaaaacaaaggggcgtaatgcccctttttctatatgtaccgtttgacgtgcaatagcgctactccgtcttcatcgttaagaccatgttcaaccgtgttggttgcggccattccttgatagagcaagatgagcgcggcacgcaagtaattttctggtgtgatctgtttcacgcaaacaagcctgtgaacttccgttatcagatcttccacctggtttcccgaaaagctgttcatcactgagttggtcaaggtgcatcatctcccacatatatcggttatccatcccttcgaacgaccggaaatcaaagcctatctccctgttatccggccccgtacaccacacagcgccgttttttccgtcaaggtatccattcgtatagcttcgcgctaaaaactccttagagaccattgaggcgaacatacgttgcgacacgttggcggcttttgccaggcgaggcgcttcgcggtgcgtatagacgaacttcgcaaaatcctgccgggtgaactccaggcgagattcgcagaacttgtaaatgtcaagaatgaacatcaattacctcatgaacgacgggttgataaagacttcggaatccatcacgcagataaagcctaattcctccatcttcggcaataagcgttccttaatctttttgctcaccccggcctggcctttgaagatcttcaggttgcggcaggcgttataaatgccctggacggtcataacaccttttgcctgtttgcaacgactggcgataacgtcatacagcgctttaatttccgctccctcaccagcaaagccggaagagtcagccgacgacaaatacgttttgctcaattcatggaacatgatgatcgcttcgtcaatggtcgccgtgtcgatcttcttcgagcgcttcccaccgggttgccagttccggatcgtgtgaatcacggaagccaggcgcataacctgcttatcaaacttacccatcgcaccgcgaagcatagtatgcgaatactttccgccgtcgcctaactccggttctaattcctggcgggccttgttcagtctccgcatggctgcatccgtaacctgcaacttaacgtttgattcgctcataatgtcatgaatcagccggaagtaatctgccttcagtgactggtcgatcggctcataggtcgaattcccgttttcgtcgatgaacacgcgttcgcctaaacgggtttgctcacgaaccaaaaggaaacgctccgagacaccgatcccgcgagaacccgcttgcatgatggcgtcgatggtttcatcctgggcaattacgcaaatgcagcccaaagccacaaatgacatattattgctaacgtcggcacgagcgatcgatacgtgacccttatcccatgctttgagcaccagttcgctgttcgtcttcttgccgccgtcgttgccatacgtgatccccaaaaggctgttaaccgccgtcgcctcatcagagataacggcaaagttgccctggcggttgttaatcttcgccaggccttccggggtggtatcggataccgggaaagttagatcacataatttttcaagtttctcttccagttcgtcacgatcttcgaaaagtttcaccatatcagattgcgataactcccctttgagcgcctgcttgttggcggacagcttcgccatgattttcttacgctcctttttgcgagactcgttaatgcgctcgacttcggcgacgatcggatctatggccagcgagttaatggcagacttaccagcggaaggcggctgcgacgtgataacgtaaagcgttgtcggttgctcgctgccgtggtactcgacccaaaagcgacccatcatcgcggcggacacggttccgagaaagtgcatgtaagcggatgattccgggaactgaacagaacgcgctgcatttagcgccagcttgccgaccacatcgtaatcattggcgatcgagattgttgggtatttatccgcgtttacgtcgatatctttgggctttggccagaatgaaacggagtcacgatacccgttcgcacgaatcgcaacgcgcaggggactgatcccctccctttctgcgatggcgataatatcttgcggtgatacgcggtcatttaaaaacatgcccttgctcctgattggttaatcgttcggctaatcatatgccgtattaaatccgagatccagtgataatctaaacacgcttgaaaaacgcgcttggattatcggggcgcatggccccgaacccgtcacaggtatttagcttcgaaagtcgttccgtcagatacactgaagccaacttcctcgcggtacagcgtccagcggcatccgtcacggtcgaagatgtatccagcaaccgcaccgagcgcacgaccactttccacttggtagcgcttgccgacgctgaaggattttttcatcgggttgctatggtcaaggccgacgcattttagcgttttggttttgagttcgatgaacgtcgcaaccgccgctccgccgtcgccagcaataaacaaatcgccgctaacgcctaccgacaaaataatgcgcttcttcttcagttctacgctgtcatataacatcattgacacgttgccctcattgtcgacgcgggcggaataaaggttgttttcatggatgttaacggcacggcttgacgtgcatttaatcttgattgacttcgccatttattttctttctcccatctcgatatacaggttaaccagatccagaaagtcagctttatttctgcaactcaatttaaagccaacgtgcgactcaattttattttgcatcgcagccagggttgcgccgccattattcatcctgagaacttcgcggcatacttcggcgagtttttgagatatcatttcttcaccacctttatttccatgccttcgcaagcggccttgatatcattaatcagccgattaagccttaaatcagtcattacatggtgatgacgaacatcaataatcccggcaacaactaacagcatgacggcaaagataaaaccaccaggcccggacatacacaaaatagttaacatcatcaagataataaatttcatttccgtttactccgttgcgtttcgatgtggtaatgctacccgactttcgctgggtagttttagcaattcgtgctattctcgataattcgcctggaacacggcgcgggcaaaacctcgcggagtaatggagcgcagcattttagtcctttctgaccttccgcccaaaaacttccaggcccaaaagaaattcacgccttctactccatccggcggagggagccgtttcggttcgacaaaaccgtttccgtgccaaatgcacgttttcttcgtgtaattgtcgcagtggggcatcttgggatgccaaacaggctcatccggagaaacatagccgccgaagtcgcgcgggtgaaaatagaagtcaggcttgcgccatagtgacgacaattttccaaccgggttttcgaccatccaggggcaaccatacttattgcctaattgctcgaccatcttcgcatcatctgcggctgatagaacgtcattatcttcccttacgtgcttgattccgctatgcgctaacagcgtgcatgacgggaacgcgaaaatgaagtcaggatctggaacgccgagaatcgatcgcttcacgtcaaaatccttgtcgatccaaatgttaacatactggatattggggtgaaccattcgaatgctgtattcgccgtggtcgccggagtcggcattgaagcaatacaccttgcatcccttgatggcccacggcaggcccatgatgcctgagccgtcgaacatgcagtaaataaccttgtctttcatgctttccacgcctcaatgaacattctgttcgattccagcgtcagcgtgacgccagccagggaggactgaacgaggcgaccgcccggaaccgtcccgatgatgtagcggcctttcgacttcgtgatcgtgatctgagtgaagccggaggcgcggttcatgcggagaacgacgcggccatgcgcgttcaggacggcgagaatggaatcagtcttcggatggttcattgtgtagctccttcgcttgttggtgtggggatagtatgccactatcccgccatgttgttttagcaaaacgtgctatgccggaacgcaggtcgcgtaatcctggctgatgtagatagtgcgctgaacacgaggttcatgatcgccgagttcctgaatggtaacatcgttgcttcctacccggcacggaaccgatccgaagataaactcgccagtttgcttgtcgttgatttgccatacatgaccaccttcctttttgacaacaaggaaaggtgcgctgtctgcgctgaactcttccgggccacgaccgtagtaatgcgtgatcgcagctttggccgcagcactgaaggcatcggtaacgtcattggtcgccttgtcgcgcatggccttgatacgctcttccggcgatccgatgatgtaggaaaagctgttcgaaatggtaactgttcgcattatattttaacctcgttttggtggatgaagtcggcgacgtaatggcattcgatcggattctcgatacccgccagcacctcgcacgacccgttattcagtagctggcaatgctggcactccgcaccgccaacgctggcaatgacaatggcgatcccgttgcatgaaccgccgaacattcgatgagggaagggataagcatcgcaggtgcaaaccacctccccggctcgccgtttcctcatacctggcccttctcgatgcagaaaacccaatcacgagcgtcaaccgcaaagcgtgcaacgccgtcgagcaccacgaagacagtaaacccgttgacgccgcgacccttctcgatatcggttacggtacggaacagatcgcttgcgccatattgaattttatccccgacgactacatccgcaaatgctttcatggttaatctcctgactggtttcgatgggttaactataccaggcctcgcggcccggcgtttagcaattcgtgcttatttcactgctttcttcgctgccttgtacgcttctttgaaggccggaacatcttcgaccggaatccagaagccggagccatagccatcgtcatagcaagggcattggtcgcagtagtcgccccaggttttctcttcgccgccgacagagaagccagtggccattttgcataacgcttcctcaaccgcttcgatcttgtcggcgtcgctatccatgataacgaagttccacttgccgttatactcactgcccaggttgattgattcgcgttgaagtttcatagctttggcccctttggctcaattcgtttcgttgaagtcatcatagcaaagtcgatcgggtgggttttaacaaaaaatgctattcctgcgattgctgattattccaccgattcggaatagtggaatagatggtgattgcacctgattccatggtgattagttttgacgaatcatgattgcttttgattgtttcattctgtgcaatggggtgatgcattgtttcatgatgtgcaacgaattgcataaatgtatgcaccatgcacgcaatttgccgctcgaagctgtcaaaacaggcggccatttgtggcggctttgtggttatgtggttttatggggttactttgtggcgggaaaaatcttaccgaaaatccgcgcaaaaaatgaacaataaatacatatagaatatacgtaagtatatataaaataagaatattattattatatatctatatctatttctctttgtggtaagatttatccgcgtgctggcttactcgttcgctaccgcgtcaaaaaatttttgatgttccgcgccgccgtcgtgaaatatataaaggggcatatataagggggttagttaccgagttaccacaaaaacggcaaacgcagttgacacaaggctttgatggggtattattcacggaggattgagcttacaccaatctaaccacaaattttaacacaaccacaaaggagccacaaaaatggcgagaccaaaagcacaggacaggatcgaaatcaccgatcccggcgagttgctcgacctggcaaagtcggcagcaagaaagcggatggatgccactggcgaagaccgcgagcagatagaagcgattatcaaggaggcatacgacaaagcctggggcggcggtgagtacctgcgggcgcgattcgttgctgcgagtcacgatctgcttatcagcgattcagagtaccgccttgccaccaggggaagtgggctgtacgactcgacgatctcaagcgcactgaagcggttcgcaaaaccaggggagaaaatcagcaggcgcgtcgtgaatgggttctaccacgtcacgatcacgaaagacctttcgaaggaggcggtagccaaaagccatgaggattcgatccggaaggaggagcgggagcggattaaaggtttagtggccgctcttgccgtagacttcgccggggatgctctgaccgggatttacaaggcgaccttgttcgcggctatcgatcttggattgaacgccagcgatatcagccaggaggccagtcatgaagagtaagacttcaatagcccaaacactcatgcggcaatataggggcatgataaaaacaatggatcgggttgcactccagcaagctgtaaaatattgctaccgtgcatcggactcctggacttacaggtttaaggatgactccgtgctatggttccataaaggtagagcaatcatcatcactaaagaagaagcactaaaactatggaggagagtatgaagctatatccagaccaaaacgacccggcggcaccgatgcgcctgggcgacacgccaatcagcgagcaggaggttatcgcagccattgccagggcatcggacgaagaaaatccaaccgccctggaatgcgttacagccgacttgctgttaatgtcatttcttccgggatctgaatcttacattcagcacatcaccgagacgggccaggcggtgactaagccggaattcatcggcgcgtcgaacgtcctggcgatgatggccgatgagtcggataacatcatcagcctcgactatccgcaatagcactttttgttaaaacccgatcagtgagatcgggtattatctcttcatcgacaacgaatgaggaaaacgaaatgattactctgattacctgggaacacgaaaacagcaagccggaagtgcgcgagttcgagaccgtggcggcgtgctacaacctggcggcaaacggtggcttttacaaggcgcaaatcgttaacgagttcggggttgtcgattatgaattttaaggcgagtgatgtaaaacctggcgcggtctacggatcgcgcctcaacaaccgcctttggcgctgggacggcgaaaccatgtggactaaaggcgagggcgatgttatttggcatgaatgcggctggccccaccccacaatgagccgccttgatatcgcttattatctttcggttggcgatatgcacgaggtggaaggatagcactttttgctaaaacgccgatggcgagatccggtattatttacccatcgacaacgaactgaggtgatgaagatggataaggttatcaagatgagcgaagttaagccgggcatgatggtcaagtttgctggcaagtttcgcctggttctcgcagcagatcgcaaggcgaacattctcactattcgcgttaatggaaaggcccaactcttcgcgccgcagtccgacattgaagttgaagttcgaatcaagtaagcgatcggggtggcgatgcctccccaccatcaacacggctcaagccaggaggaatggccatgccacgattttcagcaacaaccaaacttcgcacattcgccgggatgccgatcccacactcatcaaccaaggccgtccagggcagcgagcacggcgtatacttccactggttaggcaagtggcgcttcaccgtcattcgcggcttttacgtgacctgcgatcgcgtggatattgccgaccattccggcgggaaccagattcacgagttcaaaaagcacgaatagcactttttgttaaaacgcgatcggggtggcttgctatagtaaccccatcgaaacgaacaacggagcaccacaatgaaatctcgcgaatacctcaacacccttaatggccttatctactggctggaagatgacgcagtgatgatgcgcaagcgcgaaggcaagattgtgaagaagtcgaacatgacagcggcgatcttctttgcgatggtaggcaacgatacacttctgcttgtcgaggcggagccggagcaaaagagcatgaccatgcttcagtttacagaattcctgtcgagaatcgacaaaagcaccacgactgcaaccgcacagacggccatccagggcggggccacccacattgccatcgacggtaacggcgacgtcttcgcattcaagatgcgcccgcgcccctacctgccggatgacgacgacgcgagcgactacctgggcgaatggcttcgcgggtcggagcagtacggccacattgcgcgaacagtctgcttcctgggcaacactggccgcgagcatcgcaactggcgggaactctgcttccagatcccacagcaatagcactttttgctaaaacacgatcggggcaatgcgttatcattaccccatcgaaacagatgagcaaaaacatgattggcaaccacaacaacgaactgaacgcagcagcccaccgtcgcgccgtcgagcagaacttcaatgcgcttaaagtagcctgcgatgagatgaaagcaatgcttgaactgccgtcatgggatccccaactcgaagactactatgacggcctccgcgtcaagcgtgacgatatcatcaaccgcctgcgcctggccggaatgttcctgtaaggagaacgcaatgattcacgaagtcaaatccggcgagcaagtagtggcgaccatcacgcagcgccacgttgtagccttccagattaacatccctggcacgttcgatatgcagtcgcttgacgtgccagtttgggccaacacggttgccattgatgccgacggctcaatttgggcctatgagtctaccgctgaaaatgttcgcctactgagctactcgcctgattcatgggtggataaggggccgggcggaaacaaaatggttcaggttggcgaaatggctcgcttccctgattgggcaaaatcgaagattgaccttcgcggcctgaaatagcacgttttgctaaacgcccggtcagaggatcgggcataattatcacgaagtcgattaacgaccaaattatgcaaggagacaggataatgcagcaattcaaatctcgcggcaaggtatacaacctgccagatactgccactcacgccgcacctggtgtatgcgtcggcctgtactttatggacggcggcaagtggttctttattggcgaccttgtgacggatgacgttaagcctttgctttgcggcaagcatcgcggattcttcgatcatgatatcgtggaactgaaaccgaagctaaatcctttcgctttctggaacaaaatcaaaggggcgatctttaaatgaaccaattcgaattcctggcgcgggcgcaccgtgcgcttgcaatgtacgccttcagcaagaacatgaagattatcagtgttgaggttgagttcaacaatatcagcatttccggctatgtgggtggctcgtaccacgttacaaaattcagctttccgtcgctggccagcctggagcgtgaggcgttcggtttctgaatagcactttttgctaaacgcccggtcaggagatcgggcataatggccacataccaaacaacggagatttatcatgaagcagatcgtcaaaaacgcagtaatcgccatcgtcggaaccaacttcgaaggcaagaaaagccgcattcaccttttgcacgttggcaatgatggcaaaatgcgcggagctttctattacggcgagcgaggggagcaccttcacagtgaattgcattccgtcctcccgctaaccactttcaacgagtggcgaacccatcgggaatggcagcctgaataccattacgaggggttgattgttgagtcgttcgttgctgacccgacaaaacttaccgcccgcgactataagcgcatggcacgcaaggcgcacaaactaatgaaacgcacgccagaagatcacgtatggcatatcttcgcaaatcagctttgaggtgggttgatgatacgtttatcagacttcgatcgccactgcttaaccgggcaatttggcgaaaagccagtgttgtgcaagatctcgaaggttaagggcgagccgtttgagcaaatcagaacgcttataagtttttccagacgaaaccgcctttacatccaggcgcgcggcggactgttcgcaaagcaggtttattttgcgtatggaacagggttctacactggcggcgacggggttaacccatcgccgaaaagggttaggctgcgcgagataatcgaacacggttacgtttggactaacgggatctactaatggaaacggtaaaagtaatttgcacgcacgtcggctattcgccgctatcaacctatttcacccctggccgcgagtatgacgccaggttcggccccggccttgatgaagtgtggattttgcaggacgaccaggaaaccacggaggacgaagaattctggccagcctgccgtatgccggacgaaaagatcgccatgtacgccaataggccatatgaaaacaacgttttatttgaggtgaaagtatgaaagtaagcaaaaagaaactcgcgctgtattgggccttcttcctggtcggcctggtactgcatgaccacgtaggctggcaggcgatcggcatgatttgcatcatcattggggtatgccgcctgtctgagattaacgggttccgccgtgggtatcgggcagcgttcagcggcgaaaaagaatagcactttttgttaaaactgccgtaacgtcatttgataaagtggcgttactgaagtgaacaatccaatcaggagcaacgcaatgaacgacaatttaatcgcactgctggaagaactgaattcctacggctgcgcatacatcgagctttcgagcgagcaggttattgaagtcgcaatcgacgatgacgccgggttcaccagattaagggtggcggcaggggccgaagaggaattcgaagactgcggcatccgtgaagtaaccaaccttctcgaatcccaccaggtgaaggagatccgctaatgaacaccgtcaaacttatggttgtcaatgcggcccgcgagcgtgagcgccaccttatcggctgcgtattcgatgccgtcgaggtgcacgaaccgctaggcacagtgcacgtaatccagggcggatacctgaacgaattcatcgtcaacccgctggacaccgacgaagacttgaccatccgtgttggtggcgagccggaaaatgcgcttttccacctgcggaaagtgtcgaaggcgtcgcagcgcaagttgctggttcgcgcactgaagcgcatagcgaagcagcgcggatacaccgacgcatacatccgcaagttcggcacgttcgctggcgtaggcgattgggcgcggtcatgggccgacttttacttcaacaaatccggcgaattctgtgccgcgcatacggactggctgcatggaaccgaacacgatcccgttaacggccacgagtggtacgaattcattgaggcggaattagacgccctttgatagcacgaattgctaaaacgaacgtcaggggatggtgcatactatccccacactaacaaaagatggagcctaaccatgaacaccacacaaatcatacacctgatcccgtccgacaacttcgccaaagacgacgacccgctgttaaacgccgttattcgcgccgggatcgattgggcgctgagtgatgcctcgtgcgaatcatttatgcgtgaaccgttctcacgaatcgcggagcttgaacagcaggttgcgttcctgactggtgaacttcaggcggctatcgccacgatcgagaaggttcgggaaatcatgcgcaccgaacctggctatgacgttgaagatcacgcgcgagttttgcgcgtgatggccgacgctttcgcaaagctccagcaatagcacgaaccacaaacacgaaccgtggttgctgcatggcaaccccatcaaagataaggaaaaacatcatgatttacgcaattattgccctggtggttcttgttctggcactgtatgcgtgcggctgtttcctcatgcgggccttcctgaaatctgcggattctaccgacaaggaagatctttatcctgtgcttttctggccctggattacactttccgccgttggcagcgtgatcatttcccgcaattttaagtggtgagatggctattgggttccaaaaatggattgcccgccaaatagcacgaattgctaaaaccgatcaggggtaagctggtatagttaccccatcgaaacgaaacggagttacagcaatgaaaatcaaaatcaccaaaatcgacacgctcaacggcgacggctcaattaccctggaagaatgcggcctcaaaatcggagaagttcttgaggtcgacggccacttcaacgacggctcctactgtgtgatcgctccgcgcaatagcgagtttatccaggctggtgacaatatcagcgtgagtgcagacgaatgcgaggttgtggaagaatgagaaacaaaatttgggtactgacctacactatcggaaccaacgaggggcgcaagtcgcgccgcctcatctgcgacaccaaagagcaggcgattatgcagcaaaccgttcttggtggcgatcttgtcgaatatttccgcaagcctgaagcgttcaaggtgaactggccggaaggcatggatatcaacggcgcgttagcgagcctgcgtgagatgcagcacaacccgaagacgtggagcgactttcaatgcctgcgggcggagccggaagtgaaggccgacccgttcaccaatattcgggcgcagcacgcggaatggtcggatcgccagttcggtaacgttgggccagtcgggccgctcaagcacctggcgaaagaggcgatcgaggccgccgaagcgccggatgacattagcgagttcgccgatatcatcatgttggtatgggacgcgacgcgccgcgccggattcggcgatgagcagttggctgaagcggtggcggaaaagctggaacggaacaagcgccgggcgtggggcgaggtcaaagatggcgaaccttgccaccacgtaaaaaattaacgaaatcgaataccgtttaaagcgcctgtaagccattctggcgggcgcaaatttaaggagtgcgattgtatgcctgaatactcaaaagtcgaagatatgccgattggcgcaacgattacgggtatctgtatgagtgagtcggtcgacgccatcaagccgctggcgttcccggttacgcaggtggagacggacagcagaaaagggttcatcttcatctacaaaaatttcaatagtccgctgcgtgttgaagtgttcattgctcgcggaacctgggtggagtgggagaaggccaaatgttcggactgaatgaagcgcagtacaacgccgtgaagcgcatagcaaagcagatggccgcagaaacaaaagacgccatcaagaaggacaagaagacctacgatcaggtcgccgcgaagatgatcgataaacattgggcgcaaatcaacacgctggttactcgcggccagtttatctggatagctggctacctggaaggtcgattcggtcgcagggatggcgagtatgaataaaaaacagccaaacgattcagcgacctattgacgcaatcgcgctgaccgggtaacgtgaaccacgtagacacaagaggcggtaaacatccgcaagtctcgccccgctttggggcatttacaaaggggttatgatgcaatataagatcatactcacggcaagaaaaatgggcggcttttgcaagtcctgcattcaagagttcagcatgacgattgaggcgaacgacgccgccgacgcggtggagaaagcaaaaaagcaatccggcgttaatctggatacgcataaaatcaacatcaactacataagggaagtcaatcaatgttaactctgattattgcactgttaatgctgttcataggctatcacgttggcgcggctcatcttgtcgagcgcctttcaaagcgggtacatgagggcacttttgctgccatgttctacaacaagaaaacggcacgttgggaaaaagttggcgacccggaaggtgtcgcaaaacgaatagctttttcgccgcttccgtatgttgactgcgagcctttcgtaaaactccagaagacgctgaatcggcgaaacaaactgatatgatacaagaacccgcttcggcgggtttttttatgcccgcaatctgatatactcgcaaatcaacatagaaggagggtgcaaa

SEQ ID NO: 45 - DNA, 51032 bp, unidentified
  source 1..51032: mol_type = genomic DNA
atgaacataacccgcttcggcgggtttttttgtgtctgcaatctggtatactcgcaattcaacacagaaggaggattaacaatgtctgaagaacgcaaaaaacgcgtaacgaaatcgcacttcgaaggaaatttcaaggcgctgtacgaaaaagattttggcgtagtgctggggcgaaccgccgaaatgacgccacaacaattcttcgagatcgcgaagggttatttccagtgggccgaagaaaacgccatcaaggctgcggaaaccgccactttccagggcgacgttaacgagtggggcgtgaacaagccgcgcattttcacgatcacagggttaagcctgttttgcggcgtgaaccagtcaacgcttgtacgctatcgccacgaccctaactatgccccggtcatggagtttatcgactctgtaatctatgagcagaaattccagcttgctgccgtcggcatgattaacgcttcgttcgtcggtaaggaaatggggatcgacaagccagccgttctcaacattgacgccgtagctggcaacaagaacgagatcaccgatgaagtattggagaaggctgttagtaacattctggacaagatttaagggccgatcatgaatgacgaaatgattatttgggaagacctgaagccagccgacaagctggcaatcaaggcattgagcacgcgcaacttttcgctattcctgaagatctggtttcagattatccagggcgaaaagctgatgtggaactggcatcactcctacttttgccacacggtagatgaaatcatcgccgggaagcgcaaaagcacgatcgtaaacgttgcgcctggttcgacgaaaaccgaagcgttttctatccacctcgcgccgtatgcgtatctgaaatgccggaaggttcgaaaccttcagatctcgcagggtgacgcgctttcaaaaggcaactccgaccgcgtaatcaagatcttttcatcgggcgaatggcaggagctatggccctcgaaattcgggcggaagcagatcgacgaattccaggttctggatgacaacgatcgcgtaaggctggaaatggtgtcccgttcgtctggtggtcagatcgtcggtaagcgtggcgggtacatgactccgggtttcagcggcctaatcgcgctggatgatatcgacaagcctgatgatatgttctcaaaggtgaagcgcgaaaagagccacatcttgctgaagaacaccattcgatcccgtcgtgcgaagaagaagcaaggcgacgaaacgccgatcctgtccgtacagcagcggctgcatgcgcaggattccacctggttcatgatgagcggcgggatggctatcgaattcgatcgcattgttattccggcgatggtaacgagggaatacggcgaatcgctccctgactggttgcgtcctgagttcgaacgcgacgtgttatccgggccgtcggtggtcattgatggtgtcgaatactggtcattttgggaggacaacgaatcgatcgagaacctggttgccttgcgcgatgccgatctttatacattcctttcgcagtatcagcaggagccgatcgcattgggcggcaacgtgtttaagtcggaatggtggcgctattacggcgacagcgaaaaggcgcatgaaccgcgcccggacaagttcgaatacaccttcattacggcggatacggcgcagaagacgaacgaactaaacgactattccgtgctgtgctattggggcaagtaccgcgatcgcgtctacttcattgatggaatccgtggcaagtgggaagcgccggatttgcgcgtgcaggctgaggcattcattaagcagtgctggcgcagaaacaaggaatgcgggaatctgcgaaagatttacatcgaagacaaggcgagcggtacgggtctaatccaggatctgaccaaagcagttaatggcatgggtgagatcgtcccggttcagcgcgacaaagataaggtgactcgcgcgatggatgcgcagccaattatcaagggtggccgcgtcgtactgccggacagccatccgttcattgcggagcttgtggcggaaatgagcgcgtttacctatgacgattcacatccccacgatgacatttgcgacaacgtatttgacgcagcgaacctggaaatgaacctgagcgatgacccggtagagcgaatgaaacgcctggcaggattgaaaaagcttggccgctaatacataatgtgggcttaacggcccacaaatcacacaaggttaaaatatgaaagctatcaagatggatgactacaatcagatcttcaatggtggcgcggggtacgcgtcaaccacggcgatgattgcaagcacgttcgggaatatgtcgcaagtcgaggagttctatcacaataacggactggcgaaaaagattgttgacgtgatcccggaagaaatggtgtcacccggtttccagcttaacggcgtctccgataacacgaaattccagtcagagtgggacggtcttaaacttgagccgcaaatcaccgatgccctttgttgggcgcgcctgtatggtggctcttacgtcctggctatggttaacgatggccgtatgctgacttcagccgcgaagcgaggtaagccgctggaatcaattgtcgtttacgactacgattcggtgtccgtagcggaggaggagaagaacccgcgaagcccacgattcggcaagcccaagatgtacaccgtcaagccgttaaacggcggtagcgactttaacgtgcattatacccgcatgcactacgtcgacggcgagcgtgtaaccaacaaggtgcggaaactcaacaagggcgctggcggcacggtgctgaacaagtcgatgattgaagcgattcttgattacgattattcggagtacctcgcaacgcagttgctgaagcgtaagcagcagggcgtgtggaaggctaaaggtcttgctctaatctgcgacgacagggagggcgaatacgcggcccggttgcgcatggcacaggttgacgcgaattccggcgttggtaacacaatcggcattgatgcggacgacgaagaatacaccgtgattaactctgatatttcaggcatcccggaattcttgtccgccaaaatggatcggattgtcgcgctgtcaggcattcatgagatcgtactgaagaacaaaaacacaggtggcgttagtgccagccaaaacactgcgttgcagacgttttataagctggtggagcgcaagcgcaacgacgactacaaaccgctgttagaattcctgctacaattcatcgtcactgaggaagacttcagcgtagagtttgaaccgctgtcactgccgaccgattcagagaaggctgatatctttaagaaaaacgccgaagcagtacaaggactggttacggatcaggtcattgactcgaacgaagcgcgcgataccctatccgcgatggttcccgaactgaagttgaaaggcaatgcgccggaacagaaaaagttaccggatcgcacgccgggtgctggtaagaccaaaacgcaaaaatctcagatcctgaacaacacggaggaaggcggtgatgaaagttaacggcagaattccaaactggcgttatcctgaagcaagtgagcgggatttatcccgcttgatgcaggacgcgacaaccgatctggtcgtggaaatgcgggatcggttagaccgcctgaagtttgacgccacggctgaggagattaacgaggcggaagacgatatcaacgaggcggcgatcgcgttctttactgccgtcattgcggcgctggcctccattggtctgactatctaccgattcaactctaagcagtggctggttattgcgctggcggctggcgggcgcgataatgaagcggtcatgatgctgaaggagttcggcgctggtggttatgagcagtggtatcagcaggcgctgaagaaatggcaggataccgcaaaggcatcaatccagaagttaacagccgatatcgtcgctgactggacaacgaaagttcgaaccgccaacaacatcggaaagactcgcgaacagatcgatgaaatcatcgagggccgatacgccatttatggcagttggtcgcgcaaccgggcgagcggcattatcggaagttttaacagtatgttgatgatgcagcgactaaaagatgctaaagtatcgcattacttttggttcggcatgatggacgatcgcgaacgcgaaagccacatcaaactagaaggtaagcgacgccgcgtaaacggtgacggcattttccccggcgaggagtacggttgccgttgctgggcggttcccgattttaataacgtagaggaattacaatgaaaagagttcaaagattcgacacggtaaaggtgaaggcccgctttgatgaaaacggctttctggtcgataccccgatcgttgcgcgtatcggcgcacagacctaccagaccccgaacggccagcgcgttgagtttcgcccgcgatccgaggtgttcgatgctgaatcgctggcgtcataccagggcaagccaattactttgggtcacaagatggtcaacgccaaaaacgcgaaagggctggtggtcggatcctgttccggcgctggcaaagaggacgggatcggggttctggttccggtgatgatttacgacggggagtcgatcgagcaggcgaaaaagcgcgtggcggctgaattgtccgttgggtacacctcgatcgatatcgacaaaaaaggctggggcaacaacgcgacgggcgaatactacttcgatgaagacctaccggaaaacttcgaagaactgaaaaacgattccgtctctgattgggttcgctttgatgccgtgcaaacgaagattcgcgttaaccatgtggcgcttgtttttcgcgggcgtgcaggaattgcgaaattaaatcttgatagtgagcaagaatttccctatgatgacgactcaaaccacaaaggagctaaaacgatgattatcaaaattgacggcgtagacgtcgaagtagccgataacgtaggcgcacatattgctaaactggacgcacagatcgcaaccgcaaccagtcaggtaacgagcatcaccgcagagcgcgacgcacttcaaaccaaagttgatggcattgaagatgaagtggcggcacgtgttgccaaaatcaaagccgacgaagacgcgaagcagaaagttgtcgcgatcgtatccgccgctggcatcaagtgcgacggcctggacgttaaagcgatgaaagttgcttacatcaaagaagcggatggccgcgacttgtcagataaagaagattcgtatatcgacgcttcttttgactttatctccaattctgataagatggcaagcaatcgctctaaagtcttcgccaaaaaagaagatggtgagcaggaagacaagaaaggcgcgccgaaactcgatggttccaacatcatcgacccgcaagccaaattccgtaactaataccgtgcggccttcgggccgctacaaaatccaaatcaaggagatttaatcatggcaattcctgcaacctatacccgcaagcgcgatatttgcattccgggccagatcgcggatacttcgctgtacaacatcgacggcacctgtgccgctgcaaatgacattttaactggcgttctggtagcgttgtccggtggcgttgttgatggtcataaagtggtcgataccgctaaaactgctgatgctgttctggtgggcgtaaccactcattcccattaccaatcgccggaattcaaatacgacaaattttccgccgtaaacgttatgacgcatggccgcgtgtggtgtcgcgctgcatctaccgtaaccgcagcagattgcgcgtttaagtcgctggtaactttcggcgctgatggcaccgtggcaaaaggtgatgctggcctaatcaaaaccgggtacactcacactggtgagtggttcaaaaacaaagatggcgtagtcctggtgaaaatccagttaacgcaggacgcaaccgcgccagccgcccccgctactggtggggcgtaaaaaataggggcttcggcccctttttcatacgttaaaaaaacctttgaccgtttagcaattcgtgctattcttcatctcgttaagtcaaaacacacaaacaggagtttcaaatgactatgaaattagatgcattcgagcagaatgcaatcaaggttgcaatgcagggtatgggcatcgacgctaacaaactcgacgcgcacggcatctggactgttaatcagcttacccaactcttaaatcgccagtacgagcaggcttacccgcaaactggtgtgctggagcttttcccggttactaccgaactgagtccggtaacgaaaaactttgaatggctggagtttgacggcgtgacctctgcgaaaatcatcgcggattataccgacgacctgccgaccgttgaagcgatggcgtccgagaaaactggcaaagtgttccgcctgggtaacgcgtggtttatctccatcgacgaaatcaaagcaggtcaggcgctgggttccagcctgagcgaccgcaaagcgtctcttgcacgcgaaggccatgaaaccctggttaacgatctggtgttcaaaggttccgcgccgcataacatcgttagcgtgttcgaccagccgaacattaaccgtctgacctccgcaggctggactacgccggaaatcgcattcagcgagttgcaggatctgatcgagacgatcgaagatgtaacgctgggtcgtcaccatgttaccaacatcgtgatcccgccgtccaagcgccgcctgctgacgcagaaaatgccggacgttacggaaagttacctcgcgtggttcaaagagaactacccgaatgtcaccatcaccgcgattgcggaactggaagatatcgacggcgcaggtactaaaggcgtgctggcatacgaaaaagatccgatgaatatgtcgatcgagatcccggaacgcttcaacatgctgccgatgcagccgaaagacctgcatttcaaagtgccttgcacctccaaatgcactggcctcatcgtgtatcgtccgcttaccatcgccattctttctggcgtgtaactagaatggcccttcggggccattttttattgttgcgaaaaacctttcattgtgtttaaatcaaacctcaccaaaacaggagagatacaaaatggctaaaaaagatactgctaccatcgaaccggaaatcaacgaaaatccggaaacctcacagcctgaaaccgcgaagccggatatggtaacaatggaaaacgtgggcgcctgcctgattaagttcgacggcaagaaagtgctaccgggcgaaaccttcgagatcgaagagtctcaagttgaccgcttccgccacgatatcttcaaaggccgcgtagaattccacgatgatattcgccgcactcgcgactacatcgcagcagtgaaagcgaaagcaaaaaccatcgtgcagcctacgagcgccgaataaaaaaaccaacaagggcgctacggcgtcctttttcatatctggagaaagaccatgaattacacgattcaagatgtgatcgacaaaatgcgcagcctcgcgccgccacttaaagaagtaccggaagaactgttaaccgcgtgggtggtgctggctgaggaattcgtatgcgcgtctaagttcggcgattcgatcattacagcgttggcgctgatgaccatgcacctgatgtttctggacggcgcaatgaagcaggaaggcgaaagcgtggaatcatactcgcagcgtgtagcgtcattcaccctgaccggggagttttcccaaacgttcgatcgcgtgtcttcggctagtgataacgaaatgctatcaacgccgtggggtaaaatgtactggcgcatgctgaaaatgcgcggcggcggcttcggccttatgaccgctggcggtcttcatcgttgcggcataggaggttaaacgccatgaactacaaagcaattcaggcccgcgcgagtgcgggcattaagtttttcagcgatgccgatggcgtatttaacaagtacaccaaaggcgctggcggcggcatcgaccccgaaaccggggaggatatcatccctggcgaggttgtgaccacaatcaaaggtgcggtgcgggatatcaaagatcgcgatatcaatggcgaaaccatccttgctggcgacaagcgcggcttctttactcacgacgtaccaatcatggaaggtgacgaaatcgacgttgacggcgagcgctaccgcgtagtgaatgcccgcccggtgaaacctaccggaaccgttgttgcctaccgccctgttttgcgaagggtggcgacttatggctaactacaccatccgggagttcacaggtgcaattgatgcgtggtgcaaggcggctggcgatgcgctggaggacgtcgttaggtttacgtgtgaagatattcaccgtgaccttgtaatgcgttctccggtggatacagggcgcttccgtggcaactggcaaatcacctttaaccgcgccccgctttacgcgattaacgcatacgaccaaacgggcgagaagacaatccagaacggtaacgccaacattgcactatacgcaaaaggggccgggatcacttcgatctggttcagtaacatgctaatctatgcgaacgcgctggaatacggccattcaaagcaggctcccaatggtgttatgggcgttgttgctatcaggcttggcgtttatgtaactgaagcaatcaagcgagcgagggcgaaaaatgcactatgaaatggcgttaaaatgcaaggcagcggcggctaaattcgctgccgacaacgggttgaaggtcgcaggcgataacgttgactttatccctccggcgggcggtgaaacctaccttaaagtctcctacgtcgaggcggattcaagatcggttgacctgtcaaggaaatgccgagtctatctggcgatggttcagattgacgttatctttaagccggggatcggaaccgactccgcaaggctcattgcgcaaaacgttgcaaaatatttccctgaaggtaaaatcattgattctgttaataaagtttatgtgagcgaatgggcggaagtttccggcgtgcagaagcacgaaactggttggtttttcccggttcggttcacagtaagatgcaacagcgtggaggatagcggttatccaaccacctaactgatcttcgagattcttataatttcttgccagtccggaaatatataggcataatggcggagtaaaactttcattcaaacaggagtattcaacatgcatttaccaaacggtgctaaggtcttctttgagaaggctcgcggtgcggagattccgtttaccgcaatgacaaacgacgtgaaaaaccccaaaatcacggtgacagatggtgcactcgacgttaacgatatcgtgatctttaccgattgcacttggagcgacattgtaaataaagtggctcgcgtcaagtcggtatcggctggtgtggcaactctggaagagttcgacacctccgacaccaacaaataccctacggctgcaaccggaagcgtgagcgtcgtcactgactggatcgagttgccttgtattcaggacttgggtaaagacggcaacgagcagcagtattataactaccagtgcctgagcgatgagcgcgaacagtccgagcctacctataagtcggcggtgacgcttaactacacgtttgcgcacgagtacgataacgcaatctacccggtgctgcgtgcagcagacgccagcaaagaggcgaaagcgatgtacatgtacgtcccgcgagcatccgaggttcgttattggtctggcactgcatcattcgatgacattccgactacggctgtcaacgagatggagacggtaacgcttgatgttgcgcttaaaggttcgcacgttttcttgcctgtaaccaacgcttaattaactggcggggcttgtgcctcgcctttttttatgcataatagcaatcaacatataccaatcaggagattacaaaatggctaagtttaaaattcgtattggcggcgaacttccctccttcaaacttccggtaactttcacttgccccgatggcaaagatgcaaccattaacatgacggtaaaacatcactccaccgatgaaatgaaggagttttatgaaagcgaagaaaaagcgccgaaaggtaacgtggattttatccgcttcatggccgaaggctgggatctggacgaagaatttacggatgaaaacatttcctggctgtgctcgcattacccttcctttgtcatggcattacctcaaacgtacatggccgcgcttgccgggcgtcgtgcaaaagtctaaggcgggctgtttatctaacgcttcagcctgagttaaccgatcgccagcttgctgagtatggtttacggcgatcggattacgaggctgatttagaggaaattttcttcgatgagcagaccgcccaaagttggcaactattccaggccatgcaaacgcaatggcgcattgggatgaatggcccaacggggctggactataatacattgcctatgttctttgaattgtataaaatcgacaatcgagaagcggcattgcttgacttgcagatcctggagggtgaatacctcaaacagatctacaaaaaatcacaataagcgcctacgggcgcttttttcatatgggggctaacatggctgataaagtagctggcttgacgttcggcgttgacgtgtcgcaggttgacagagcggtgcgatcacttgccgaactgaagaaccaaagccaacaaaccggggcgggtcttcagtcgctggcggacgctgagaagcgcgcgacggcgcagactgaggaaatgaaccgcgcgttgcagaaccaaaagaaaaccacggaaaaggccaagaccaatttcaacaacatcgcgggcgctatcgatcccacgatcgcgaaaatggctaacttgcgcaaggcttcggaagaactggataaggcctggcaattgggccttgtgccggacaaggaattcttccgcctgggggctgtcattgagtcgaccaccaacaagctgagacagcagcagttggcgctaaccgaagaaggccgcgcggcaatcgctgaggctgaggcgaaacagaaggcgactaactccgggcgtgattttgtcgccagcctgaagcagcaagcagactcgatcggcaagactcgcgccgaactgctggaaatgaaggcggcacaattaggcgtttcaactgaagcggcaccgttcattaacgccctgaagcagcaagagcaggcgttaaagaaacagcagaatgctatggggcctgctggaatttcagcaggtcaatataaaatggcgatgcgccaacttccggcgcagatcactgacgtagtaacgtctcttgcttccgggatgccagtatggttagtagctattcagcaaggcgggcaaatcaaggatagcttcggcggcatcgggaacacgttcaaagttttgttgagctacattaacccgctaacagttggtgcggttgctttgggtgttgctcttgcggctatcgctaaagctgggtacgactcctggaaatcacagcgagatctagcgaatgcattggtgctgactggtggatatgctgcaacaactaccggacaaatcacctccctaaccgatgaaatcaacaaaacatcatcggctactgtcggaagcattcaggcgatcgcaacgtcactggctcaatctggaaaatacagcatcaaccagattaaggcgatcacgaagactacggcggaatgggcggcgcagaccggggagagcgaaaagaccattactggttactttgactctatcgcaaaggatccggttaaggggcttgccgaactgaatgatcagtttaatttcctgaaggaagggcagctaacctacatcgaatctttgcgaaaaaccaaaggtgagacggcagcagcggaagcggcaacgaaactctttgctgacacgatggataaacgcctgaaggatatcgcagacagcgcaacgccgcttgaaacgatgtggactgacattaagaagtgggccgcagactcttggaagtgggtaggtgatcacaccgtcggcgcgctaaaccttattgttgacacggtttcatctatcatcaacgttatcaggaaactgattacggatggcgacgccatgatcgcacaattcatcgttgatgctggtcggcagttgcagaaagtgcctggcatgggtgactttgggaatgattttcttgcacagcaagaacagctaatcaaggcttccaaagccaaatcagcggaactggcgaagaccattgcggagcagcaggcaaggatcgcgaaaggcgaaatgggttacattgacgcggccaaaaacaaaaacgtgtccggcggctacagcagtgcaacaaaggataaggtaaatcaggaagaaaaggatatcctgaagaaccgaaacgccaggaaggagcaggtagacgccggggttaagatcgatgaacagtatcagtccgaattgctgtcattgcaggcgcagttgaaagtattgcagcagcacaaagggcttgacgacaaaatcagccagcagcgcaaagactactttaccactgtcgcaaaattccaggtgctggaagaagcgagcgccaagcgtaagctgacgcagagcgaaaagcagatgttagccaataagcaaagtatcatcgctatggcggaacagaaagcgatcgtgggcgatcagattgtccggcagcagcgcctgaatgccttgcttgacaagtcggtgaagtatcagaaccagatggctgagaagacgaaagcgcttcaggataccgctgggatggggagtaagcagcaggagcgctacagggcaaacgcgcagatggcggcggactggaagaataatggaggctcgcttgacgacgcccaatttaagcagatgcaggcagcaagcgaacagttttacgcgcagcaggatgcgcagatgcttgactggaaagcgggattcacgcatgcctgggctgacattggcaacgaagttaatgacgtgtactccaatatcgggagcatcacccaaaacgcatttaacggaatggctactgtgctaactgattttgtcatgactggtaaggccagctttagcgacttcgcaaaaagcgtgattaatgacattaccagcatgttaatcaaaatggcgctgttcaatgcaatgtctgccgcgttcggcggtggaggtacgttcagcttcgccagcatgttcagcaaagggttcgccagcggcggctatactggcaacggtggcaagtacgaaccaaaaggcgttgtgcatggtggcgaattcgtctttactaaagaggcgaccagccgattagggccggaaaatttatacaggctgatgcgtggctatgcttccggcggtctggtaggctctaacggttcgtcaggatctggcgtgactaacggcggtaacgtggcggcatcggcagcaatggtgtttagcatgggcgacgtgaacatcacgatgggttccggtcaggatagcaagggcttagagcagggagtaaggcagatcgtgaatgatatgttcacggaggcactgagccaaaacgggcgaattgcgaaatacgtaaacgagaaaacgaggggttaacagtggattctttttcatggtgtactcaaattcaaggaggggcggcgaaagtcgccgtttccaacaacgttcgagcggttagtttcggcaatggatatatccagactgcatcgagtggcatcaacacaaagcgccggacggttccgatcgtttatggcgggagggattgggaggcggtttatgatttttgccagaatcacgtgacgaagccatttatctggaaggcaccagatggaagaatgggtgtattcgtcgtaacggcagactctgttaatctcgcgccgatgggtggcggggtgtatgaggtaacggcggagtttgccgaacgattctcttcagccggatagcacaaagcgccctttacgggtgcttttttttggcctatgatctggagtcgataagaggaggaaatttatatgacaactaacgtttcaaaagagtttgcgaactgcttgcaaaagctgttccctggcgagatcttaacgctgattgacattgacgccacgaagttcggcgggcagatctatcgattccacaacgagaatatcgcctactcaaccgaagaacttttggcggcggttaacggtggaacgctgacaccgaaggcgatcacgtttcgcggtgagcaatacggcccgcgcccgttcgggatcggcggtatcgcaatgtcaagtgacggcacggtagaaaagccaacgctgacggttagcaatattgatgcgcaagcgagtgctcttattcgcgcctacaacggcctcatgcaagcgaaagttacggtatgggttttggtcaaggatttgctgaaagaagatggaaacgtggctgatggcgattttcggcggttcgtttactatatcgaaagacctaaacaggttgacccgcagaaggccacgtttgagctaacatccgtcttcgatatggatggcttgatgattccggcccgtcagactcaaaccgtttgttattgggcgcaacgcggctggtacaaaaccgggaagggatgcagttacaacgggcaaaacggatactttgacaaatacgggaataaggttgatgatcccagccaggatgtttgcggtggccttgtttcgtcgtgcagattgcgattcggaaatgaggctttggattttggcggttgcgctactgcaaccttgaaaagcggacggtaatatgttaactccaaaaatcaaaatgcagatcatgcagcatgcgaaggaagtttacccgcatgagtgcgcagggctggtaacgcagaaatcacgcgtgcagaaatatcaccgactcgataacgtttcgccggatcctgagaacgaatcaatgccggacgaaacacagtacgcgctggcgtcactggaaggtgagccgatcgccttcgttcactctcacactggcgacggggcaaccaccgttccgagcgccacagatttatgcttctgtgatgaatctggcttgtcgtgggttatagtgtcgattccagaaggtgatatgcggattatcgaaccgaagcgcaggccgctgattggtcgcccctgggctttgggcgcgtatgattgctacggcctggtgatggattttcacaagcgccacggcgtcacgctgactgaccgccgactgccgttcgaatggtggaagccggaatacaaagaggatctttaccgcgactactggcgcgaagatggattcatagaaaacactggcgatcccgaagtaggcgatatgattatcttccagcttcaggcggacaagtggaaccacgctgggatttacgttggaaacaataatatccttcaccacgccttcggcaagctatcccgccgcgatatctattccgggtggtatgagcagcacaaggttttaatttgcagacataaggatcttaaacatggcatcacatacaaagacgattaaactttccggctcccttgggcgtcggttcggtgtcttccataacctcgcagtcgattcagtcggcgaatgcattcgggcgctatcctaccaggtggaagggtttaaagccttcatgcagagcaaggttggttctaacatgcgctttggtatcgtcgcggacggaaaaccaatcagcacgaatgactttgcaacgttcgccgtagcgaaggagatccgaatcatccccatcccgaaggccagaaagaacggcggattgttgcagatcgttatcggcgctgcgattatggttgcggccttctttactggcggtgcatcgctggcggcaatgggggcgttttcatcggcggcatttatggctggtggcgcaatggtattgggtggcgtaatgcagatgatcgcgccgcagatgggcggcaacatgcgagcgagcgagtctccggaaaacaaaccgtcgtatgctttcggcggaccaattaacaccacggcagcgggttatccaatccagttgccatacggttacaggttggctggcggcgcgctgttcggttcgggatcttacgcagaagataacaactaattcacccattcactttttagcctgggggcatagcctccgggctttttgtcgtgtacaattgcgagactattaacaggaggctagacgatgactaatatcaaggcccgcaaagggggttcaagcaaaacgcgcactccggtagaaatgccagataacctgatctcgaaagacaagattaagttactactggctgtttctgacggtgaagtagtggatgacttcagcctgaagcagttgcatttcggcggcgttccggttcagaacgaagacgggagctataactatgagggagttattgcagaatttcgccccggcacgcaaacgcagagttacatccagggcttcagtgaatcaagcgctgaattccaggttgcacgcgacgttacctttaacacgccgtacacgctgacggtatcgaacaagaatctttctgctatccgcttccgcctgttatggccccgcgtgctgacgcaaaaagataacggcgatatggtcggttcggtcgttgagtacaagatcgaaatggcggttgacggtgcgagttatcaaacctacttgaccgacaaaatcgacgggaaaaacacgactggcggttacgatcgcagcatccgcgtcaacttgccgcaagacttcacgtcgcaggttcttatccgcgtaagccgaattacgccggacgctgacggggtgaaggtggtcgatgccttccaggttcagtcctacgcagaggtgattgatgctaaattccgctacccgctgacggcaatgctttacgtcgagtttgatagcgatctgttccagaaccagatcccgacaatctcgctcaagaagaagtggaaaattgttcaggttccgagcaactacgatcctgttaacaggacatacgccgggacgtgggacggaactttcaaatgggcatggagcaacaacccggcttgggttctttacgacctgatcatgaatcagcgttatgggttagaccagcgcgagttagggatcccggtcgataagtggtcgctatatgaggtggcgcaatattgtgacgagcttgtgccggacaatcgcggtgggatggaaccgcgttacctgatggatgtggttgtgcagtcgcaggtcgaagccttccagttggtcagggatgtttgttccgccttccgcggaatgactttctacaacggggaaagcctttctattatcgtcgacaagccacgcgatccggtttacctgttcactgctgataacgtcgttgatggcgtattcgttagaacttttccgagcgaaaaaacgatgtacacgtcgtgcaacgtgatgttcgacgacgcagagaaccagtacgaacaggacgttgaaccagtattcaacgctgacgctgccatgcggttcggtcacaacccgacaagcatcacagcgatcggttgcaccagacgaacagaagcaaaccgccgtgggcgctggattctgcaaacgaacctaagcgcaaccactgtttcgttttctactggcctggaaggcatgatcccgtcatgcggcgatgtgatttacgttgcagatccgcattggcaatcagcctttaaccttgtgttgtcaggtcgcattatggaagtaacgggaacgcaggttttcctggctttccgctgcgacgcgaaggcgggcgatacgctgattctgaacaccgacgacggtaagccattacgccgaaccattgccagcgtatcagcagacggaaaaaccttgacgctaaacgtgggatataacttcgaagttgcgcaggacagcgtattcctgatcgaaagtgaccaactggcggctgaacagtacgttgttaccaggattgagaaggggagcgatgacgacgaatttactttcgccatcacggccacccaatacaacccgaacaagtacgacgcgatcgacaacggcgtaatcactgacgaacgcccaacttcggttgttgaccctgattcaatgggagcgccggaaaacgtgtcgattagttcattctcacgcattgtgcaggggatgagcgtagagacgatggtaatcggctggtctgccgtgcagtacgcaaaactttacgaggtgcaatggcgtaaggatggcggcaactggaacaacgttccgcgcacagcgacaacgcaggttgacattgaagggatttatgctggcgaataccaggcgcgcgtaaggtgcattagcggcggcaatatcgcgtctccgtggtctgctttggctagtgcgacgctgaccgggaaagttggagcgccgaaagggccaattaaccttttcgcgtcggatagtgaaatctttgggattcgcgttaagtgggccatgcctgaaggtgcagaggatacggcatacattgagctttaccagtcgcaaagcggaaccgatcaggatgcaagcctgcttaccctgattccttacccggcttctgaatactggcattcaattctgcccgctggctatgtgaacttctacaaagccagaagcgtagaccgtatcggcaacgtttcagcgtggactgattacgctcgcggcatgtcttctactgacgttaacgccatcacggatgcgatcctggatgaaatccttgatagcgacgcaatgaaagaacttcaggagagcgcgcaggatagcgcggcaaaactcaatgactacgctaacagcatcatccaaaatgcgttggctaatgatgcagacgttagaataatgaaaaaggagaatggcaagaggaaagctgaaattaaacacgcagaagttctcatagcaaatgagacggaagccagggttcagcaggttaaccagatatcggcagagttcaacgaaaacctcaatgctggattaactcaagttaacgaggcactagccaatgaaactgaggcaaggacaacggcggaaacggcattatcagcaaggattgatgacaatgaatctgcactagaccagaaacttgattcgtgggctaatgttaacggtgttggctctatgtacaccatgaagttaggtctgaagtataacggacaagaatatagttcaggtatggctttacagcttaccgcgcaaggaagcaacgttgtttcgcaagttctgtttgttgcggatagatttgctatcctccgcaatgcgtcatccggcgcttacacgcttccgtttgttgtgcagaatgaccaggtgtttattaacagcttgctcgttcaggatggctcgattaccaacgccaagatcggcaacgtaatccagtcaaataactatgtggacggccagagcgggtggagcattaataaggatggcggcgcgcagttcaacaatgcgatcttccgtggccacattgaagcagcaagcggttcgttcaaaggcaccgtacaagcagacgcgttcatcggtgatattgcggttgctaagcgctatgacggaatgacactccgccgtaaccagacagtgcagcgtgacggatattaccaaaacaggggatatggaatgaccatagtgcttgcttgtactttggtatgtgagacttacggcagcggaagttcacagcttggttataccgttgacgttacgtttaacatcggtggtcagcaggttgtgcgccgcatttatgttgatgctggtaacattgttcagggtacaactgcggttgagcttcgcttcgctgccgaccttgctgctaataacaacaatgttagcttcttcatcaaggctgccgggcgcgacgcagtaaccgactataccgtgacggttgacaacataacggccaccgcgttccgcacaaacagtaactcattcagctaacagagaccccgcaaggggtctttatttttggcaaaaaaaaagggccatttggcccttttattgcataaataacatttcacaatcgatcactacaatttaaatcatattgattgtaattcctgatctaacctacgcagtccgcagttagtgcaaattgttgcgtatgccattatttggaatattcatcatagccaggctttacatcctccgaacctgcgaacattggcagggtctttatgtattcatacccttgtttaatgatgtttttactttcctcccaatctggtgtaaatgcaaatgattgaaaaacaccatccacaagttcatcattgatattgttgcaaaggaaaacatccagattaactgagtaacggtcccccctaaaggtggagattaccgcgtaattaaaagttatcgtgtcggtggtcccgtctaacttaatagacgggcgctcaataagaaaattacctttaagtgccatttttagttctccagaatatatcgccactgcggcattgatgttactacagtgccggttgttataattaaaacttgctcctgtaaacgcaagtcaagcgcaagcgtgtgaagtccatcagaagtataacggtgtcttacttgtccgttaactgttactgatactgaaccgccggaaatcgtaaaaccaacggtgtgccttcctggcctgcggtatgggtatgaaaacatagaccccgctgtaaacgttgtcccatccagtggatgagacgcttcacgcatcgcaaatgacgattgagatgtgtctccgtatctaaccctaacaaagtttgttgcccttgtgtttaccggcccaagctggtttttatcttgcaagtaaataaagtagttagacgtgtttccctccagttttgcagcttcgccaaaagacactaatccagtattactggtcgatttgcattcaatgaaatatagttcagcttcggttttgtctgcgtatccagcatgggcgttattcgtccataagttccagtgaaactggaagtctccgccaactgtttcgtcaatcttaacgattggtgcgcatggccaaccaaactgtgacgcgttcagattttgagcaaaaccaccattgaaaaacaccctgcttggatctagaaccgcaagaactctctggccgcggtatttcagtctgctgaggttgtttgtcatttcaacaagcgttgatacatcccaagctgtcatatgctggaaagttacctgcgaattgaagccaacacgcataaatctaccagagttctgaacgtgagcgccagaaatatttacctcagagttacaaacttctagagcatacagatcatcagcagtgttagacgctgcatatgttgtatttccgcatatggctatatttctgtttatatggacgttgcgactatcccaaatgcacaaatggccaacgccaccagcgccaatgagaatattttttagtgacatagtgccacattcgctgaatatcaggccgccagaagtttcgttgtgtggaacgtaatcttcataggtcatagttaaatcgtagcaattcgatatgtaaccaggcgctctgttgttctgcgtccatactgaattccagtgacccatccctgcaccggtatttgtgaaataaaaatcacgtccacaggttttaatgttcagaacaacatcgccaacggcctgaattgacggaagaacactaacaagatcgggccactgagcagttacagcgctatagtctttcttgccggtactatacaacactgtgccagggtaattggccgcatggatatgcaagtccggggcgttaaccatcgactccattctaagaatgtagttgttttgaacaagtgtggcgatttgttcatcagtgtaattggtcgtactgaaagcaacctgcgagttgtccacgcgtagccttactgatgggttgttcgcctgaaccaagaaaaacccagccccttcgccaattgcgcatgtcatatcaaagccgaatctgtcaccaccacctgtagtagggtacttccatgaaagtgattccgggaagtttccgcagcgcatatagtgcctttgagcaagatacactacgccacgcggcacgcccgcgatgattgattgcggatatccactatctgacaattgcgcagcagcaagcaggcagttttcaaatgctgcatcctgtggcgctgatgtttctgccatacttttagcgccagcccagcgcatgcgaattgtatttcctaaaaatcttcgcttccatagcctaccaagtgcatctcgaaggtgtacgcagttatcatcaataatcgtattgtcatcatcgtcgattaggtcgaaaacaccatgaccgccatcgccagcaacagcaaatcctgatacctttatcttttctgcgttgccagtatagcttctgatataagagtaattggcttcgccaatatgtttaaacccgtcaggctgtgccaatgctaccagcgttgactgttcgccagaatcatcaatgatctgctgaatttcatcgcgcactgctttggcgtcagatgctgcctcctggcttgctgctgctgcctgctggcttgctgctgctgcaccctggctttccgccgctgcatcttggcttgctgctgcatccccttttatctgctccaccaatgcttgcaaagtggctaaatcaaagtctttaaaaaaatctaccgcttcagcaataacggtttcctgtgattgatagtaacgaagagtttcagccacatcttgcgccagtccgtcgacggtcagtgagtcgcttaacaggatcgcgtaatcactggacggaacaaccgcgccgtttgtggtgattgcattaatttgcgtgtcactgacaaccttgttaactaccgccatttgaattggtgacgataaaaacaggatcgtagagccggggcgaataagcgttagcgatgattgccagttagttccagtcccggtaacgatgccgcttgaatccatcgcggctttgccttgtctgtatagtgccattttaagacctcttttcgtttgttgaatagcgcagagataatagcatcaatgaagcaataaaaaaagggggcttttcagccccctttagttgtcaaatcagaacgggatatcatcatcgaaatccatgccatgattaccaccaccgctttgcggcttcggttgttgttgttgcggcttcggttgctgaggctggccccacccaccctgctgattaccgcctccctgcgttggttcgcgctggctgaattccagttgcggcataatcatttcattgtggctgtaagttgcgccgttgtgctcgcggtttacgatctgaagtgtccggcaggttacgctaataaccttatcgacctgcaacgcttcatcgtaccacgcaatcatgctttccttcgcgaagaagacggcgcgatagttggtgtatacagtttcgtcctggccgtcgcgattgcggatcttcattcgctccgacaggtcgaccgcatacatcttccacggcccgttattgttgctgccctcttttacgtaaggcgcttttcggattacccctgttacaacatgcatttttattcctatggggcggtttcccgcccggttaaattagttgaaagatgagatatcttgtgcttcaggttcaggctttgattctacctgttccggctcacgtttagcaacctcttgcggctttccggggttaaatccgttcgctggcgtcacttttagttgcgcctggcgcttcgtgatatcgtcttccgtcaccttccattccgcaggcgtcaaggtctgtttagccagcttgtaaatctcgcggagagattcgaggtcttcgcacgcatcaatgcgttttttgaagtcttgcggcttcatcttcgcgatctctgcgtcatcgtcagcctgcttgatgcccagcgcggcggctaacgcataacggcgagcgtatgaggttgtcgagccatacgcttgctcaacggttttgctgatcggcatgttgaactgaaacgccatccactcgccagattcgtgcagaaacatcgtttcaaggtgcataaccttgtcggtgctggtatccatcattgattgaatgaccataattttgttcttttccagcgatggcccgatggcgtcaaggatatcgccgagattggcgtaggtgtttcccaggtggctattcttcccgcttttcttcgcggcgacgaagccagacttcgctttgattaacgcaacggcgatctctttgaaactttcagatgtacgcatgacaaactttccttttcctgattggtggagcgcactatatcacaagtgcgccgtagtgtttagctatttgtgccgtatacttccgggaacatgtatttcacgaattgcggcgtgggcaacttcacttccgctgcgttcgattcgtatgacggccaaacgtcatgcttgacgcattcgtcgtactggtgaatcacgcttttatactgcttccgcccgatctcaatctgctgatccgttaacgtgaacgcgagaggcgcgaacggtgatcttttctcctgcgtcagcaggcggacaacaaccgggcgtttttcgttgtacgtcttaacgaacagatcgcgctgcaatgccattttgagatagtagcccagcttgaacgccagccgcccgaagtcatccggtttagaggtctgagtagttttgtagtcggtaatcaccaccacttcgaaaacttcatccgggttaaacccccactccttgatgagttcaggattcgatacgacgtcaacatgatcgagtcgaacctttaccgggacgccgaaaatttcgccgaagattgacaactcgcgttgcgctgtatccgattcaatgcacgccgcgtgccgtgggttagccagcatcacgtttcgcatttgcacgaccgcatcgaaatcagaatccttgaccagcttccggcctgagttgatggcggcgctttcgtcgcagagttcgatcgcccaccacacgttaacatcaatcccggcgcggtatgccatttccagcaattcggggtagtccttgttggacgtcccaatcaggccgcacgctttcaatttcgcagacaatgccgacttcgaagtaatcagatccttaacgtcgcccggcgcggtcgctcgcaggtattcgccattaaatctggacgtctcaagcatgcaggtatgggagcaagtgccgaatgaaagcgcggatgtttcttctcgctccttgtatttccagtgggccggggaggttgcgtaaatctcgccgaggcttgagccgctaacgtatctggcgcaccaggagttaggatcgtggtaatcatcgttggataattccgcgttggtgtatgccttaaaaattgcttcagccattggtatcactccgtttgtggtttcgttgcgttaagtatacgcatgacgattccgggtgcaaggcaaaaagtgctattcgtcaactggtcaaaaaatgagcgaaatttacgtaagatttagtaagatgcatcttacgtgattttctttatatatttcatgcggttaatccaaatcggtaagatggtaagatgcctataggtaaatattaacaggaaaattgggccgaaatcgcaaagcaaaatacatatacccggagaaaatcttacctacacagatagatagatagagagtaataataataatatagttagatatcatatacttatatatattctatggtgcgatattggtcaaaaagtgagcgaaatttacgtaagatgcatcttacctaatcttacttaaagtggtcgaccagttggtaagttgctgaatttttggcataaaaaaaggtaagactgaaattatcaatcttacctaaaatttgttcacgttttaatcagagaagggatgatgccacgtagagctttcgttcgaatccgcctttgaagttgtcattgttcggcacgataactttcatatcgcgttcttcagccgccgccagcatatcccgatctttcctgctgcatacgactcgcaattctcgcttaccttcgccgccacccttccctttatatcggtaggccacgatctcaacgttggacgggatgatgcatgcccacacgtcacacttaaacgagcttgctatattgaagtgcatcgcctccacccaagagcgagccaggtaaattggcccgttaccgccctcgctctgattggttacgatcaccgatccgaaagtcaggtcgccagctaacatcttctcgcggccctcctcatcaatgaataagatgttgcagtattcatcgtccggcccgtcttcatgcaccagttgcatcgggagtgcatgaaatagctcttgcctgccgttctcgtgtgtttttacgccaacccggtatgattcaacgaactcattttcaatgccctcatagagcgttacaggagtgctatcgacggcctccgttctgttcattatcgccacgacgcgatcgtgatctgccatcttgccgtagtcgtacccgttatcgcgagtaacctgcttgttgcgcttaactacgtactcttgcggaactttgcccaggtatcgcccaagaatgttgatgcactcgctatacggctcgccgctcaacttcattaaccatccgatccccttatcggcaccgcagccactgcaatatgccccgccgtcgccgcgattctctaatttgtcagtccagcggaagcgatccttaccgccgcagttagggcagtcctggtgtttgccgttgaaatagcgggagtggatgccgcaaatattttgtagcgcctcgcgccacatccccggcatgtatggcaaaacctctttttcgtcgtaaaaatccacgtcataacctccaaataaaaaacgcccacgcgagaatcataacccggtaggcgtttagttgttagtcaaattgtgctatcggactactcgaagcatttcgcggcggtcgcagcggcgcgtaatcggcttgccgttgctgtcgaatctgagatccgggcggcaaaatgaagccctgaagcctttgcagtcattgcggcgataactcttatgcaccaggtaagcaccatctgctgaaatcatgccgcgcttaatccactgctgaacaacctggatgctaacgcccaactcctttgctgttttggcgattccgccgtatgcctcgatcaccaattccatccgggtagccaggcccgcccttacttcatccttcaggacgtaatagcctgtcggcttcttgcggggcttcttatctttcccgcgtgacgtcccgttattgccgttcaaagttctcttgtctacctttgccatttgttccataatttaacctcacagcactttttgttaaacacgataaaatttgctctgtattatacacgcaaccatgcgaatgacaaatcaggattaaccatgctgacaattgaacaacaaattgaagcctacgcagacaagatcccatctattcaaaagcggttcacggtcgggaatgtcgttccgtacccttaccaggctgtcgcgtacatcgagacggcgaagcggatcgcgaactatgagcatccgttctacattaaggcgtccgtatccgcaggcaagacaatcatgatcgccatgctcgcggcgcagtgcaaaacaatgaacttgcctatgatggttctcgccaggcaggctgagatcgtgaagcaggattccgaagaaatcagcaaccttgacgtgccaaactccgtttattgcgccgggttaggcacaaaggcggcttacttcccgatcgtcgtcggctccgaagggacggtggttaatggcctgtttaagatgctgggcgattacgttccttcagtcctggcaatcgacgaatgccatcaggttgactggcaagacctcgcagaagcgatcgcgaacgatgaatccttcgagtacatgagccgcgcaaaggataagccgtatcgcgtgaatggtgagatcgtcgatgccgattacccgtacaacgaaaagttcgaaacggttgaatttggcggcggtcgcactcaatataccatcgtaatcatcgagttaatgcgccgttgccttcagaagacggggcgagaacttcgcatcgttggctacactggttcggagtttcgcggcgtcattccgatcttacaggaggacaagagccagcctggtttctggcgcgagcagattacggacattaacacaaactaccttgtcgaattcggttcggtggttccgactatctttggtgacactgaggccgacggcctgggctatgacctgtcagagtttcacggctccagtcaggacggcacgcaggattttagcgccgaagacttgcgcaagatggagaagaaaatccacgattccggcgaaatgactaagctgattatgcagaaggtggtcgagcgtgcgcagacgcgaaacggcgttcttatcacttgcgcgggccagcgacactgtaaggaggcggcgagctacttaccgccggacgccacatacgcgataatcacagagaagacgaactcgaagaaacgcggtgaaattctggacaaggcgaaccggggcgagattaagtacatcttccaggtgatggccctaacgactggcgttaacgttccgttttgggatttttctgtaatccttcgcaagatcggctctctgacgttgctgattcagcttttggggcgaggaatgcgattgctcaaagactggcagaaggaagcgccctattcgtgggtgaaagaagatcaccttgtatgggattttgccggaacaatggatgacctgggccagttgtatttcgatcctattcttgagcaggcgcagtatcagaagcgcaagagcagcaagaacggcccgaaaatttgcccggtctgcaaaggcgaaaatagcgagtacgcccgccgctgcatccacaaggatagcaacggcaatcggtgcgagtatttttggacgtcacagcgctgcgaagaccaaaaggatccgaggacagggaaaataaaggtcaagggatgccacgctgaaaacgacattgttgcgcgccagtgcagatgttgtggcgtgcagttaaaggatcctaacgacaacctcaccgggaagcattacacgcaaaatgactggtatcaggttgtaggctttgatttgggattgacacgaaaccaaagcgggatcatctttaattacgtgttgctcaaccatgacggcgagcggttcacggctagggaaaaattcttccctgagtcagaaagtgcgatttgcggtaagttgtggcgacaaaaggcagtcttccagcatgttgatgatgctgtaatgcgtggcaagttgggcggtatgaaaaacgcccgcaagatcctggagtatgcagaatacttccgcgcgccgaagcgcgtaacgcatcgcatcaacggcaagaaggaggacattatttcccgcaaagactttggaggcgaggagtgattacagacaaaggggattacctcgaatattacggcgggcctgtaaaggcttgcccgcttgaaaaaatcgaccagatgaacagcgtttcgtggctgcgttacgaataccccgattatctgttctggcatacggtcaacgagggcagcaagcacaaggcgagcgccgttgcagatcatcaaatgggattgcttaaaggcgtaagcgatatccttgtgctgattgggctgggcggcaaatacccgttcgccgccattgagctaaagcgccagggtaaatcccaggcatcgccagtgagtaaggagcaacgggaattcctcgcatccgtccgaagccgtggcgggttcgctgccgtggcctatggattcgagcagtttaagatcgcgtttgaagacgcaatcaaatagcactttttgttaaaactacccggcgagagtcgggtaatattctcccatcgaaacgaataacggagtattgaaagatgaaaaagatgcttgctttaattgttctgtctcttggtcttattggttgcagcgaaaaaccaaaaacatatatttgcggtaacgaagcatttgaggttacgagcgattatatgaaggtggttagcggcaagagcgctggcgttttaattgatggcattggtgaaaaccagtataagctgtttacgccacttggaacggctttttatactgtcaacaaaaacaccattgatattaaagttagcgtttatcagaacactctaacttgcgaggttaagtaataatggcaaaagacacccaagacaaagacactcacgacgcgttcacgacgtttgaacagcttgagcgtgaaacgttcataggaaacgcgcttgccactggcggacactatcaggccgtcaagcctgataagttctaccaagttactggcaaccgatacgccgggagcaagacgccggatatcgtccgcgacaagtggtcaaccgatcgcagccttattgcttacatggaggagcgttacgggccatacgacctggacgcagccgccgaagaaagcaacgccgtctgccggaagttttacgacgaaaagaccgattgtctcaagcgctggtgggggaaaaataagcacgtctggcttaacccgccttactcattcccggatcccttcgtgcttaaagccattgagcagatggagcatgacaaccagatcgatattttgcttcccggcgacaactctacggcgtggttccgcgacgcacagaaggcagcggctgagatcatttggattgtcgcagacgtcacggaggatgaagacggaacgcaactaagccgatccggtcgcctggccttcattaacggcctaagcgggaaaccagtcgacaacaacaataagggcagcgtgattttcatcatgcgcaaactcaagccgggcgaggagcaaaaaacgttctacgttccggtaagcgaaatctgcccgtctttaactaaaaagcgcatgcgcaaacgtgggatctgaaaaatggaacagcttgaatctttcaccgaatacctccacatcgtcgttaccctgctggacaagtacggattcatcggtacgaatgaagaaaagatggccttcgccgatagcatcgacggcacttatcaagagttcatggataacggcacgccgcttgctgactggcccgcgattcttgagcgcgaattgctggattttcgggcgcgtgaaggcgcggaatatttcgcgaaacagcactaattgctaaacaatgcccgcggcgagcgggtattattgttccatcaaccaatcaggagctaacgccatgaacaccaaaaccatcgccgacaccatcaagatcgcacaagttaagccgcacatcgtatctcgccacctgattaacctttctcgcctgtgcatggccgactacgtggcgaagcctttagagaatggccttgatggtgaaatcggcgcgatctacttccgagccgcccacggcatcgaagaaattcacatgtacgagcagatggctgaatgcttctgcatttacggtgacgaataatgattgtcgaatctggccgcgctgccgtctggcagcatgccaaagaggctggcattagtgacgatatcgtgatgatcgcaaagcatttcgatatcaaggatatctccattgtgttcaatgggaaatttacctatcttcatgagcgcccactgaagcgcacgcgtatagcagttgcgacgcgggcggaggccgacgctctgaagatgttcattaatgagtcgaagcagaccaaaaaatattacaagtagcgggagtgttgagaatgcgatatattgcgatcctgattacggcggtggttctcactatcgcaatctttaactacgcaattcaattgggataaattatgcaacctaaaatcacagacgaagaatttttagccgcccgcgaggaaggcaagacctaccgcgagatcgccgaagagttcggcatgaacgttcgcagtgtggagcgtcgcggcgttcgacttgcccgccaggggcatttgcacggtaacaaccacgtagcgaagcacatcccggacgggttcggggtcaaaggcacatcgaccatgattcgtgcgaacggtgacgaagttgtgcgctgggtcaagtcagaagtagaccgcgaccgcatgatcgctttaatggaggcggcgcaagcatcattctgcgaagacctcccgcgcgctgaaccgcagccgaaggatgaatcgaagtttttcattgaggatcagcttgccctgtatccgatcttcgacttgcacatcggcgcaatggcccacaagcacgaatgcggcgagaactacgacaccagcacagccgaaagggttcttaaccgcttctttgactattccgtttcggttgccccgcagtcgaaaaaggcggtcttgctggtcggcggtgacttccttcacagtgacggcctggacgcagtaaccccggcaagtggtcacgttctcgatcaggacagccgttacgcgaaacttgtctatgtggctattcgctccttgcgccgcgccgtgtcgctactgctgagtaatcactcggaagtagaggttcaggtgatcgaggggaaccacgatcaggctggcatgatctggttgcgtgcagcgctcgcagcgttctatgaaaatgagccgcgcgtattcgttgacgtaagccctgcgattctgcatcgcaccgtatggggtaaaacgatgctgggctacactcacggccacacgatgaagaaggcagaaacgcgcctcgccgcaatggctactgacttccgcaaggagttcgggcaatgcgactacatctacacgcattcgggccattggcatcaccagaccgtaacggagcactcgttagggattgacgaagtacacggccagttaggggccaaagacgcttactccgctcgcggtggttggcgctcatatcgccaggcggcggttattctgtacagcaaagaatatggcgaagtaggccgctttatctaccgcccgaacatgtaaccacaacggccccgcgaggggccaacaaggaaaaccgatgaataaaaatatctgcattttcgatctcgatggcacattgtcaaatggcaaccaccgcttgcacatgctgccgaaaaaagatctccaccttacagaaagctggagcgaatttaatggtgcggccattggcgacagcccaatccaaagcactattgatgtggcgaatgcgctttatcgttccggaatgaccgttatcatcctgaccgggcgatccgatgaggtgaaaaccgacacgatgatttggcttgaccgctacggggtgaaatatgacagtctaatcatgcgccgcgccagcgataaccgtaaagatacggtaatcaaggaggaggagttacgcaaaatcggacttgatcgcattgttgcggcatgggatgattcccccaacgttattgcgcactttcgcggcctgggtattacgacttaccaggtctgcgactacggcgacaatcttcacgatcatttaaaatcgcacggagtagacaaatgaaaaatgtaatcattctaaacggagcgcctggaatcggaaaagacaccatcgcggaaattatttcgcggaagtgggaatacaagatccttagcttcaaagagccgatgtttgccatcgctcgcgccgtcctgggggctacggatttttcgcgctttgctgccagataccacgaccgcaagcgcaaagaggtgaagtacgactttttgggcgaccgttctccgcgtgaattcatgattcacattagcgaaaattttgtaaagccgacgttaggcaaaaatcagttcggcaagttgctttgcaattcagcgctggtttcgccgtttaattgcgttgtcagcgacggcggcttcgatgaggaggtggagcacgtcgcattgcatgaggcgcttaacgtgtttgtcgtccgcctccatcgtgacggcatgacctttgatggtgatagccgcaagcatattcgacgccaggacttgattagcgacacgtatcacgagcttgattttgatatgaccactggcgagccggaagacgacgcgcaaaaaatccttgatatggtgtcagaggtggtattaaaattatcggattaatgcctttattatcactgctttaaagtttgggagccttaataggctcccttttttttgttctttatttggcccaacgcatatatcatcgcattatcacttaactaacagaggttgcatatcatgcgggaattcatcaacgcggcaaccaatggtagcggcggtgttaccctcgcaggatctgcgaccgggcaacttatcattgcagccattggtttatttttcatgattctattcggctccttcggcgcgtggttgcgctggcgagattcaaaggcgcttcgtgaagcgctggaaaccggggatatcaaaacggcggtgaagatcaggagtaaataacatggggattaaaacgcgggttacattcgcggtggcgatggcgatcgctgtcgccttcctcccaaaagtggaggacacgaaatacaaagtttataccgatatcgctggcgtttcgacggtctgcgaaggcatcacagggccggacgtaatcaaggggaaaatctatacccggtcagagtgcgatgctcttttggcgaagcacatccaggtcgcaaagcgtgtagttgacagcaaaatcaaagtggcagtgccggacaccttcagggcgtcgatgtacagcttcactttcaacgctggcggcggcgcatactccggcagcactatgctgaagttgacgaaccaggggcggctatatgaggcgtgcgaacagctttaccgatggacgtactatcgcaacccgaaaacgggcaagatggaaaaatcgcgcggcctgcataatcgccgggatcaggaattcaatctgtgcattaaggatctaaaatgagtagcttaaattttcagcgagcattggcgatcggcttcatcgtgtgggcggttgcactggtttccggttgcgcttccagcgtaccgatcctttccgatctggtgggcagcaagccggatatgacggcgcaagtcggcgcggagaacgtgaaacaggcggttggcgtgacgaacaaaacggacacgtccagcaaacaggaaaccaccttcaaagaatcggcagttggcaaggttgacacttccaacaaaaaggcggtgacgacctccagcattcacgcgaaccagattacggcggagaagatcgagatccgaaacgacgatagcggaagcatgattccgtggctgattggtgccgttggggcaatcatgttcgctgtcggtgttttcggtatgtggcgggagcgaaaaaataaaggggcgtaagccccttttttcatatgtaccgtttgacgtgcagcagtgccacgccatcttcatcattcaacccatgttcaaccgtgtttgtcgcggccatgccttgatatagcaaggtgagcgcggcacgcaagtaattttctggtgtgatctgattcacgcaaacaagcctgtgaacctccgttatcagatcttccacctgctttcccgaatagggcttcatcgtcgagttgctcaatgtgcatcatctcccacatgtatttgttgtccatcccttcaaacgaccggaagttaaacccaatctccctgttatccgggccagtgcaccacaccacgccgttttttccgtccaggtatccattcgtatagcttcgcgctaaaaactccttagagaccattgacgcaaatattctgcgagtgacattcgccgcatttgcaattctatcactctctctgtgtgaatacacgaacctcgcaagatcctgtcggttgaattctttacgtgactcgcagaatcggtatacatcaagaagaaacgccataaccaaccaccttttcattgccgtgattttcatggaagccatattgacgctccgccgcctttctggccgcgaccgcatcatctaagttgtcgaatagaccaaggtgcctttgctttccgtcaacctttatctgaactttccacttgcattctctcttgaaccaatgaactccagtcacgccacttgagttgtcgcatcgccttgtcgtgttctttttgttacccttactgctgaccaagcgcaagttttcgatcctgttatcattgcgaatatggttttcgtggtcaatctccataccttctggtattggccctttatgcatctcccatataatccggtgagccttgcgaaatacacccctaacctttattaccacatacccgttactattctcgccaccagcctcatcgccaaccttcacacgattgcaggtgctaaccttccaaaacaactttccatcactatagataaacagtcgccggaactcggcgacgtcttccatcgtgctaacttttgctcttgacataattacctcatgaacgacgggttgataaagacttcggaatccatcacgcagataaagcctaattcctccatcttcggcaataagcgttccttaatctttttgctcaccccggcctggcctttgaagatcttcaggttgcggcaggcgttataaatgccctggacggtcataacaccttttgcctgtttgcaacgactggcgataacgtcatacagcgctttaatttccgctccctcaccagcaaagccggaagagtcagccgatgacaagtaagttttgctcaattcatggaacatgatgatcgcttcgtcaatggtcgccgtgtcgatcttcttcgagcgcttcccgcctggttgccagttccggatcgtgtggattaccgacgccaggcgcataacctgcttatcgaacttacccatcgcgccgcgaagcattgtatgcgaatacttgccgccgtcgcccaactctggttctaactcctggcgggccttgttcagtctccgcattgccgcgtcagtaacctgcaacttaatgttcgactcgctcataatgtcatgaatcagccggaagtaatctgccttcagtgactggtcgattggctcataggtcgaattcccgttttcgtcaatgaacacgcgctcacctaaccgcgtttgctcgcgaaccaaaaggaaacgctctgatacaccgataccgcgagaaccagcttgcatgatggcgtcgatggtttcatcctgggcaattacgcaaatacagcccagcgcgacgaatgacatattgttactgacgtcggaacgtgcgatcgatacgtggcccttatcccacgcctttaacaccagttcgctgttcgtcttcttgccgccgtcgttgccatacgtgatccctaacaggctgttaaccgctgtcgcttcgtccgagataaccgcaaagttgccttgtcgattgttgattttcgcaaggccttccggcgtggtatcggaaacggggaacgtcagatcgcacatgctttctaacttctcctcaagttcgtctttatcttcgaacagtttcgccatatcggattgcgataactcgcctttcatggcctgcttgttggcggacaatttcgccatgattttcttgcgctctttcttgcgcgcctcgttgattcgctcaacctctgcgacgatcggatcgatagccagcgagttaatcgcagacttaccagcggaaggcggctgcgacgtaatgacgtaaagcgtcgttggttgctcgctgccgtggtactccacccaaaagcgacccatcatcgcggcggacacggttcctaggaaatgcatataagccgatgattccgggaattgaacggagcgagcagcgttgagcgccagtttgccgacgatatcgtaatcattcgcgatcgagatcgtgggatacttgtccgcgtttacgtcgatatctttcggcttgggccagaaagaaacggagtcgcgatacccgttcgcacggatggcgacgcgcaaggggctgatgccttccttctctgcgatggcaataatatcttgtggggacacgcggtcatttaaaaacatgccttgctcctgattggttaatcgtgcggctaatgataagccgtcttaaatccgagatccagtgataatctaaacgcacttgcaaaatgtgcttaggttatcggggcgcatggccccgaatccgttacaggtatttcgcctcaaacgtggttccgtccgacacgctgaaaccgacttcctcacggtagagcgtccagcggcaaccgtcacggtcgaagatgtacccggcgacgccgcccagcgctcgaccactttccacctggtaacgcttgccgacggtgaaggattttttcaccgggtttttgtggtcgaggccaacgcatttcagggttttcgttttcagttcgataaacgtcgccaccactccgccaacgccagcaatgaacaactcaccgctaatgccgaccgacaagtaaacgcgcttcttcttcagttcggcgctgttatataccatcattgacacgtttccttcgtcgtcaatgcgagcggaataaaggttgttttcctggatattaacagcacggcttgaggtgcatttaattttgattgactttgccattttatttcctttctcccatttcgatatagaggtttaccagatccagaaagtcggatttgtttctgcaactcaatttaaagccaacgtgcgattcgatcttattttgcattgccgccatcgttgcgccgccgttattcatcttcagaacttcgcggcatacgtcagccagttttttagatatcatatttcacaaccgtaaatttagtgtttttgcaagcgccttcgatatcgctaattaggcgattcactctgatattaatcatcgttttgtggtgcatgacgtcaacaatcccacaaacccacaaaaccatgattgaaaagataatagcaccaggcccatgcatagaaaatagtgcggtcattactgcgatcgtgaatttcattctggttttccccgttgcatttagatggaataactatacccgcaattaagcgggtacgtttagcaattcgtgctattcattaaagttcgcctggaacacggcgcgagcgaatccgcgcggagtgatagagcgaagcatctttgttctttcggacttgccgcccaggaatttccacgcccaaaagaaatcgacgccttccacaccttccggcggtaataaccgtttcggctccacgaatcctttaccgtgccagatgcacgttttcttcgtgtaattgtcgcagtgcggcatttttgggtgccaaacttcctcatgcggcgcaacatacccgccgaagtcgcgagggtggaaataaaaatccggcttgcgccaaagcgtcgacaatttgccaaccgggttttctaccatccaggggcaattatattggtcgcccaattgctcgatcatcttcgcatcatcggcggctgatagaacatcctgagtctgccgggcgtgcttcaccccgctatgcgctaacagcgtgcaggaagggaaagcgaaaataatgtcaggatccggtatgcccaggattgtgcgcttcacgtcgaaatctttgtcaatccagatgttgacatactggatttttgcatgctccatgcggattttgtactcgccgtggtcgccggaatctgcgttaaagcaatatacatcgcaaccgcgaattgcccacggcagacccataatcccggaaccgtcaaacatgcaccacacaacgcgctttttcattgtcacctcaccagaaagggatacattcgcggcaaccttcttcaccagtgcagccgcaactattttcttcttgctctaccagatcgtcacgcatcggcagactttcggcatccatatccatacttcccagggcatccgatagcgtcatttcctgattggctactttgatgcaatattcgcggttaagccccgcatcctgtgcggttaagaaacggtgacagtaggcatcgtcgtaattatcagccattgcttttcctccggttaaattctcgcaaactggcggcgcatgacttcgaacaggttttaccccagccgcgtttaagatccgccgccttgaccttatagacagccccgcatcctggagcctcgcagcacttcatgctttccttcgccccaatgtgatccggtagaccagtcagggagctatcgccgggattcttcgtcgaccagaacagttgcactgtcgcgacctcctcgccgaactcattaacgaacatgtaaacgcccttgcttttcagaagcacggtgcagtgatgcatttcgccgttgacttctatgtatgcgcaatcgccttctttcattagcttctccacgattcaatgaacatgctgttcgattccagcgtcagcgtgacgccagccagtgaggacggaatcaggcgagcgcccggaaccgtgccgacaacatagcgaccattcgatttggtgatcgtgatctgagtaaagccggattgtcggttcatgcggagaacaacgcgaccgtgcgcatgcaggacaaccaggatcgaatcagtctttggatggttcatgttttatttcctcgtttcgttggtgtggggatagtatgccaccatccccaaattctgttttagcaattcgtgctattctggaacgcaggtcgtgtaatcctggcagatgtagattgtgcgctgaacacgcggcgcggcatcctccaggctctgaatctcgatatcgttgctgtcgacccggcagggtgttgcacagaagatgaaataccccgtccgcttgtcgttgatttgccacgccttgctttcgggaaccgtattgacgacaaacggcgtgtcgtcggctttgaagtcttcagggtgacgcccgtaatagtggatgattgcagcagttgccgccgccttaaacttttccgtcacgtcacgggcggcgatctcacgcgagatctggatatcaacatccggcgcgccgaccatgtaggtaaagctggtttaaatggtaactgttctcatttagattttaacctcgtttcggtggatgaagtcgtcgacatagtggcactcgatcgggttttcgatcccggcaaggacctcacaacgcccgttattcagtagctggcaatgctggcaatcagatccgccaacattggctatcactatggcgatcccgttgcatgaaccgccgaacagccgatgagggaaggggtaagcctcgcaggtgcaaaccacctccccggccctccgctttctcatgcgctccccttctccatgcagaagacccaatcgcgagcatcaaccgcgaagcgcgccacgccgtcgagcacgatgaaaacggtctgcccgttaacgccgcgacccttctcaatatcggtgacggtgcggaacaggtcgcttgcgccatattgaattttgtccccgattacgacgtcgccaaatgctttcatggttgctctcctgattggtttcgatgtggtaatgataccatgcctcgcggcccggcgtttagcaatttgtgcttatttgatggattttttcgcggccttgtatgcttctttgaacgccggaacatcttcgatctcaatccagaagccggagccatagccatcgtcatagcatgggcattggtcgcagtagtcgccccaggttttctcttcgccgccgacagagaagccagttttcatttcgcagagcgcttcttcaacggcttctattttttcagcatcggtatccatgattacgaaattccatttgccgttatattcgttgccaagtttgattgattcgcgcttcagtttcatgatgtttgcctcttttgtctgcttcgtttcgatgaatagataatagcaaaagcccacgcggggcttttaacaaaaagtgctatttacaccaggcggaaccgaacttcatcaccgtaaatcacggcctgaatgtgatcgccaaacgtgacggttgcgcgggtggtttcgtactccgtgtggccgtatcgccatatcccgcgctgggggtaatgtgccgcgctttcgtgccaaatgttcatagtgaactcgccagaccccccgaactccaggcactggcctaccatcgctttgacggcctggtagtcatgccaacgctgagtagcacgatcggtaacgcgctccacatgcttgcgctctttgtgctccgccgcagcctcaaccacggcccacttactacgggtaaatattctcatttgcattttcctcaaagtcggcgcggaattgcgtagcgcccttaaaatggaaccagtcacggtggcatcgtcgccgttaatctccctgcttcacctcgaaaacgaatccgtcgcaaacgcacatatcaaccagaaattcagttgcagcgctgaacgtccattcgtcagatcccggaatgcgtttcctgatcacgccgtcctcgcccttcacccatcgcacgccagattgacggctttcatacgcaacaccagttttcatgcttttaatcctcaacggtgaatttaatcggttctttcccggtcgccttgcgatgggagttgaccagcgtttcgaacttgccgatgcactcgcgcaaatcagtgaacgtgctggcgctccccatgacacgccatgattcgacattctgcccgcgaacatagttgatgacgtgcttcatgattttgtactggtcgccatcctttttggtgtacacgtgcagcactgcgatcctggttgatttgtaggcgaatgctttggtgatgtatttgcaagtttgcatcgtgttcgctcctgactggttgatgtgatgactatacccgatcccgccagcagggttttgattatttgtgctattcctccgattgtagattattccatctattcggaatagtggaataggctgtgattgcatctgattccctggtgattacttttgacgattcatgattgattgtgattgtttcattctgtgcaatgtgatgatggagtgtttcatgatgtgcaacgaattgcatagatgcatgcaccatgcacataattcgccgttcgaatcctgccaaaacggttgccagttcacagtaaccgaatccagttcacgcacagttcagtaagataatcttacgtaaaaattgatcaaaaagtgcgcagcataagcatataaatatacatataagtatatgataaacttaatattattattattattctattattctctctatatgaatattccagttcacgtaagatagtaatgggatgcgctaccatttttcgcttgcgacagcctacaaaaaattcagtgttccgcgccgccaggatatataggagggtaggggtatatcttactttcttacgcaaactgacttgacgccttgatacgcctggcttagtatgcttactgaattggaacggaagtggagagaattacagtgaacaagagcgagattgaacaaaaatgggagtttgagcaggtcgatcccgaagtgtggatggcctatccgccagacaaacaggccgcttatcatgcctggctcgctggcgatatcttcggctatgatgacgaaccggagccggagcgcgagcggaagcaggtcggcggcaagcgggaagggccaaccatacaaagcctgattgaacaggattttattgatggcggtctgtccggcaaggtcgacgtcgaggagttcagcgccacgcacggcaagcagatcacatcgcacgccatcaggtcggcactgaagcatcacatcggcaaacatggcaagttcagaaccaggacgcgcgacggcgtgatcgaatactggattgaacgcgatgaatcggcggttagcagcgatgagcaaatccaggccgaccgggaacgggttatcggaatcattcacgcgctgaccggaaatgatcttgatgtgcgtatcgaaccaatcacggcccgcgtgctcatccaggctatcaaactgaacgtcaaagcaggagatatcaagtgaaactctatcaagaccagtacgacagcgcagcacaaatgcgcccaggagatacgccagtcgatgagagtgaggttatcacagccatcgttattgcatcgcaagccgaatttcctggctccttagaatgcgtcactggcgacttccttttgatggcattttttccaatttctgaatcataaataaagtacgttactgataccgccaaggcagtgacgaagccgtaattcatttgtgcgtcgagcgtcctggtcatgatggacgatgagcctgataaaatcattagtctcgactatccgcaatagcactttttggcaaaaccaggtcagagggatcgggtattatcaccacatcgccaacgagaggagcatcaaccatgccacgctttaacagaacgcttcaacttcgcaccttcgccggataccagatcccgaaggagtcgacgaaggcagtgccgggccgtgaattcggcgtgtacttccactggcggggccactggcgctttaccgtcattcgcggcttttacgtgacctgcgacggcgttgacattgacgaccacagcggcgggaaccaggttcacaacttcaaatagcactttttgttaaaacacgatcggggtggcttgctatagtaaccccatcgaaacgaacaacggagcaccacaatgaaatctcgcgaatacctcaacacccttaatggccttatctactggctggaagatgacgcagtgatgatgcgcaagcgcgaaggcaagattgtgaagaagtcgaatatgacagcggcgatcttctttgcgatggttggcaacgatacacttctgcttgtcgaggcggagccggagcaaaagagcatgaccatgaacgaattctctaacttcctggctggcatcgacaaaagcaccacgactgcaaccgcacagacggccatccagggcggggccacccacattgccatcgacggtaacggcgacgtcttcgcattcaagatgcgcccgcgccactgcctgccggatgacggcgacgcgaatgactacctgggcgaatggcttcgcgggtcggagcagtacggccacattgcgcgaacagtctgcttccttggcaacactggccgcgagcatcgcaactggcgggaactctgcttccagatcccacagcaatagcactttttgttaaaacgcaatcggggtgatgcgctatcattaccccatcgaaacagaggggcataaacatgatcggcaaccaaaacaacccactcaatgcagcatttcaccgtcgcgcggtagagcaacacttccacgcgctgaaggtggtgtgcaacgagatgaatcttatgcttgacctgccgtcatgggatgcgcaactggaagattactatgatggcctgcgcgctaaacgggatggcatcattaaccgcctgcgcctggctggtatgttcttataggagaaacaaaaatgcaacaattcgaatctcgtggcaagacctacaacctgccggacactgctacccacgccgcacctggcgcatgcgtcggcctgtactttaaggatggcgatagctggtacttcatgggtgatgtgattggtgatgtaccgcagaagaaatgcggcgtgctcctgggcttctacgatcacgacgtggtagagctaaagcccaagcatgctccgttctcattctggaataaaatcaaaggggcgctgttcaaatgagcgatccgaaactgcaaacggtatgctaccgcgattcagatggcgatgaattggtcgtgtcgccgttcagtggtggcgctgctggagtagagcttatggcgacccacgatagcggttgctgcgtatttgacgaccctaaggtaatccgcgatctggctaaccagttgctgtccgtcgccgatgccgtagagagagcacaaggagcggaaaaatgaaccagttcgaatatatgcatcgcgcacataaagcgcttgccatgttcgcctttcacctggatatgaaagttatatccgtgaccattgaggccggaagcattgagatctgcggattcgttggcgattactcatgcaccagaacttacacgttctcatcgctcgcttccctgtagagtcaggcttatggcttctaaccgcaaattaaggatcgtgcgcattgcgacgcttgacgccttcgggcgtccggtggagtggtatgcagcacagctgcgtgttgccttcttctggtgggtgacggtcgaacacttcggccagttgactcaggcccgctactggctccataaatccggcgcaccgcaccgcccggaacgggtaatcaaggtggttgaatagcacgaagtgctaaaactcgatcggggtaggctggtatagttaccccacaccaacaaacgaggctatcaccatgaaattacgttgcaccgattccaatactatcaactacacccccggctttgagtacagcgcggagctgggagttaccgtccgcactcctcatggctcgatcggctgtgatgtggttcatggtaacaacacctggttctttttcaacaaatcaaccctcaacgccgaacgccgtaacggttcggtcgtggcaacctttaaggtaatcgaataatgaccaacgaaatcaaatccggcggcaagattgttgccaccattgcgcagcgccaggttgtggcgtttcagattaacatccacagcaccagcgatgcaaaagccgtcgacgtgccagtgtgggccaatacgattgccgttgacgaagacggcgcgatttgggcgtatgagtcagtcgccgaagatgttcgcattataggcgtaaacaaagcctgggtagactgcgggcgctgcgatgcgaaaatgcaggaaatcggagagatggagccattcgctgactggaaagaatcgcaaatcgaccttcgcaccatgcaatagcactttttggtaaacgcccggtcaacggatcgggcataattatcccacaccaacaacggagatttaccatgaaacactttatcaaaaacgcagtcgtcgccatcgtcggaaccaacttcgaaggaaagaaaagccgcattcaccttttgcactttggaaatgatggcgaaatgcgcagcgcattatactacggcgagcgcggcgaacgtcttcacagtgacgcgtattctgttcgccagttaacagttttccgagaagaccgaactcatcaagagtggtatgctgaatacctatgcgaagggctggtggtcgaatcgttcgttgccgatccggttaagctgacctcgcgcgactataagcgcatggcccgcaaggcgcacaaactcatgaagcgcacgccgaacagccacatctggcacatcttcgccaaccaactgtaaggcctgtaatgatggaaacagtaacagtgatttgcacccatacgggttacgggccacttattccgctgttcacggttggtaaggagtatcaagccaggttcggccctggcctggatgaagtctggattttgcaggacgacaagaaaacaacggagttgggcgaaaactggttagcgtgccgcatgccggatgagaagatcgctatgtttcttaaccgaccacatgaaaacaacgttttatttgaggtgaaactatgagcaagaaaatgattgcactgtattgggttcttttcttgggtggtctgatggttgccaaagaagatggctggcaaatgatcggaatgatgatggttatcatcggggtaagtcgcccatctgagattaacggcttccgccgtggtcgccgggccgcattcactggcgacaaagaatagcactttttgttaaaactgccgtaacgtcatttgataaagtggcgttactgaagcgaaacaaaccaatcaggagaaacgtaatgaacgacaatttaatcgcactgctggaagaactgaattcctacggctgcgcatacatcgagctttcgagcgaacacgttatcgaagtcatgattgacgatgacgcagggttcaccaagttaagggtggctaccggggccgaagaggaattcgaagactgcggcatccgtgaagtaaccaaccttctcgaagttcaccaagtgaaggagatccgataatgaacacaatcaaactgaaatgcgtgtccgtcgagtcgaacgttagtatttcctgtaagcctggcgatatcatcaccgccagccgggataacgaatcctcatgctggcaattcgacggatactacctggatgatgatctggtggttcgcggcatcttcggtgagttcgcacggttcgaagtggcgaagcgcaagaccgatcgcaaactggtagttcgcgcaatgtgcattatcgcccgccagtatgggtggactgacgcaggcgttaagcgcgtcggcaactacaaaaccgtcaaggagtgggcgcgggattgggccgctttctacaccgacgaaaaaggcgagcttcagcacgatatcagcgagtacctggaagattgcagccgtggcgatgccgtccgagagttcatgcaggcagaaatcgacgccctatagcactttttgttaaaacaacattccgggcctgcgctatagtaggcccacaccaaaaaacgaggataaacaaatgctgaatatcgaaaccattaccttcccagcacgcttctacaccaaccccgataaccgtggcgaattcatcgacttcaaagcagccgacactaagggcgtatggcacgatggattggaaagccgcattccgctggactacttcattcgccagcacaacgctgtcaacaagggaaacgtccccgagcgcccttaccagtatgctactcgcctgggatcgtctattgcatgcccaacaaccaagcaggcgctggactacgcaggggaaactgctcacaacatgttcggtcggaacgagtctcgcgggattgtgaatcgcgccatcgtccacggctacggcgagccgcaggagtcgagaatccttcccggcgaaatcaaagcggccaagattaaggcgggcgcgttcgaggtgcgccgagatggcagcatgttgattaacaacgccatcattggcggtcagattcatgcagccgtgtttaaggagaaggatcgcatcaaggagcttgaggagcaggttgatttcctgactggtcaactcgaagcggtatcaaaagccatgcgcacgccggaaggtgaagacgcgcagacccacgctaaagttctccgccagatggccgacgccctggttagtttgtggcgcgacggcaaatagcactttttgctaaaacttccgcaaggccatttgatatagtggccttattgaagcgaaccaatcaagagctaaacaaatgagcattccgtatccgaacaaagacaaatcattcctgggcctggccgttgttgagattatcaacccggacgtgaccaactccccggatgagcctacccttgcacagtgggccggattcaaagcaggtgatcgactgaccgtcgagtgctatagcgacggcgagaagtgggcgcaggtagggcgcgactaccacaccaaagaatttggccaggtgctccctaccgactggttcgaacttaacgaaggcgaatataaggtgatcgaagaatgaacaacaaaatttgggtgctgacctacactatcgggactaacgaggggcgcaaatcgcgccgcctcacctgcgacacgaaagcgcaggcggaaatgcagcagcgcgtgctgggcggcgaggtggtcgaatacatccgccagccggaatccttccaggtcaattggcctgagaagatggacgttgacgccgtgctgcatgaaatgcgccaggtgcaaaacgacccgtaggcgtggaaagacctgtacctttacggcgacgctgagtcagtacgggatcccttccgctttgttcggcaggagcacgcggaatggtcggatcgccagttcggaagcgttggcccggtcggcccactgaaacacctggctaaagaggccaacgaagccgccgaagcgccggatgacattagcgagttcgccgatatcatcatgctggtgtgggacgcaacccgccgagccggaatcaacgatgagcagttggcaatggcggtggcggaaaagctggagcggaacaaacgtcgccagtgggaagccgttaaagatggcgagccgtgccaccacttgaaaaattaacgaattcgcataccatttaaagcgcctgtaagcgattctggcgggcgcaaattttactaaggtgaatctatgtctgagttctcaaaagtcgaagatatgccgattggcgcaactgtaacgggtatccagatgagcgagtcggtcgatacgattactccgctggcctttccgattacacaggtcgaaaccgacagcaagaaaggtttcatcttcatctacaaaaatttcaacgcccctctgcgtgtcgagatcttcattgctcgcggaacctgggtcgaatgggagaaggcttaaatgttcggactaaacgaagcgcagtataacgccgtgaagcgcgtggcgaaacgaatgacggcggaaactaaagacgccatacggaaggacaaaaagacttacgatcaggttgcagcccggatgattgataagcattgggccgaagtcaacacgctgttaactcgcggtcagtttatctggctggctggctatctcgaaggccgtttcggtcgccgtgatggcgagtatgagtaaaaagtaagcgaacgaactaaccgcctattgacgcattcacgctgaccgggtatcgttaaaagcgtagacacaagaggcggtaatcatccgcaagtctcgccccgcttcggggcttttattaaggggtgatgatgcagtacaaggtcatactcacagcaaggaaaatgggcggcttttgcaagtcctgcattcaagagttcagcatgacgattgaagcgaacgataccgccgacgcggtggagaaagcaaaaaagcaatccggcgtaaatctggatacgcacaaaatcaacatcaactacataagggaagtcaatcaatgttaactctgattattgctttgttaatgctgttcataggctatcacgttggcgcggctcaccttgtcgagcgactttcaaagcgggtacatgaaggcacgtttgctgccatgatgtacaacaagaaaacggcacgttgggaaaaaattggcgatccggatggtatcgcaaaacgaattgccttttcgccgctcccgtatgttgactgtgagccttttgcatcacttcagaaaacactgaagcggcgtaacaaactgat

SEQ ID NO: 46 - DNA, 51677 bp, unidentified
  source 1..51677: mol_type = genomic DNA
atgtctgaagaacgcaaaaaacgcgtaacgaaatcgcacttcgaaggcaatttcaaggcgctgtacgaaaaagattttggtgtagtgctggggcgaaccgccgaaatgacgccacaacaattcttcgagatcgcgaagggttatttccagtgggccgaagagaacgccatcaaggctgcggaaaccgccactttccagggcgacgttaacgagtggggcgtaaacaagccgcgcattttcacgatcacagggttaagcctgttttgcggcgtgaaccagtcaactcttgtacgctatcgccacgaccctaactatgccccggtcatggagtttatcgactctgtaatctatgagcagaaattccagcttgctgccgtcggcatgattaacgcttcgttcgtcggtaaggaaatggggatcgacaagccagccgttctcaacattgacgccgtagctggcaacaagaacgagatcaccgatgaagtattggagaaggctgttagtaacattctggacaagatttaagggcagatcatgaatgacgaaatgattatttgggaagacctgaagccagccgataagctggcaatcaaggcgttgagcacgcgcaacttttcgctgttcctgaagatctggtttcagattatccagggcgaaaagctgatgtggaactggcaccactcctacttttgccacacggtagatgaaatcatcgccggaaagcgcaaaagcacgatcgtaaacgttgcgccgggttcgacgaaaaccgaagcgttttctatccacctcgcgccgtatgcgtatctgaaatgccggaaggttcgcaaccttcagatctcgcagggtgatgcgctttcaaaaggcaactccgaccgcgtaatcaagatcttttcatcgggcgaatggcaggagttatggccctcgaaattcgggcggaagcagatcgacgaattccaggttttggatgataacgatcgcgtaaggctggaaatggtgtcccgttcgtctggtggtcagatcgtcggtaagcgtggcgggtacatgacgcctggtttcagcggcctaatcgcgctggatgatatcgacaagcctgatgacatgttctcaaaggtgaagcgcgaaaagagccacatcttgctgaagaacaccattcgatcccgtcgtgcgaagaagaaacaaggcgacgaaacgccgatcctgtccgtacagcagcggctgcatgcacaggattccacctggttcatgatgagcggcgggatggctatcgaattcgatcgcattgttattccggcgatggtaacgagggaatacggcgaatcgctccctgactggttgcgtcctgagttcgaacgcgacgtgttatccgggccgtcggtggtcattgatggtgtcgaatactggtcattttgggaggacaacgaatcgatcgagaacctggttgccttgcgcgatgccgatctttatacattcctttcgcagtatcagcaggagccgatcgcattgggcggaaacgtgtttaagtcggaatggtggcgctattacggcggcagcgaaaaggcgcacgaaccgcgcccggacaagttcgaatacaccttcattacggcggatacggcgcagaagacgaacgaactaaacgactattccgtgctgtgctattggggcaagtaccgtgatcgcgtctacttcattgatggaatccgtggcaagtgggaagcgccggatttgcgcgtgcaggctgaggcattcattaagcagtgctggcgcagaaacaaggaatgcgggaatctgcgaaagatttacatcgaagacaaggcgagcggtacgggtctaatccaggatctgaccaaagcagtaaatggcatgggtgagatcgtcccggttcagcgtgacaaagataaggtgactcgcgcgatggatgcgcagccaattatcaagggtggccgtgtcgtactgccggacaaccatccgttcattgcggagcttgtggcggaaatgagtgcatttacctatgacgattcacacccccacgatgacatttgcgacaacgtatttgacgccgcgaacctggaaatgaacctgagcgatgacccggtagagcgaatgaaacgccttgcgggattgaaaaagctgggtcgctaatacataatgtgggcttaacggcccacaaatcacacaaggttaaaatatgaaagctatcaagatggatgactacaatcagatcttcaatggtggcgcggggtacgcgtcaactgcggcgatgattgcaagcacgttcggggatatgtcgcaagtcgaggagttctatcacaataacggactggcgaaaaagattgttgacgtgatcccggaagaaatggtgtcgccaggcttccagcttaacggcgtctccgataacacgaaattccagtcagagtgggacggccttaaacttgagccgcaaatcaccgatgccctctgctgggcgcgcctgtatggtggctcttacgtcctggcgatggtcaacgatggccgcatgctgacttcagccgcgaagcgcggtaagccgctggaatcaattgtcgtttacgactacgattcggtgtccgtagcggaggaggagaagaacccgcgaagcccacgattcggcaagcctaaaatgtacaccgtcaagccgctaaacggcggaagcgactttaacgtgcattatacccgcatgcactacatcgacggcgagcgcgtaaccaacaaggtgcggaaactcaacaagggcgctggcggcacggtgctgaacaagtcgatgattgaagcgattcttgattacgattattcggagtacctcgcaacgcagttgctgaagcgtaagcagcagggcgtgtggaaggccaaaggtcttgctctaatctgcgacgacagggagggtgaatacgcggcccggttgcgcatggcacaggttgacgcgaattccggagttggtaacacgatcggcattgatgcggacgacgaagaatacaccgtgattaactctgatatttcaggcatcccggaattcttgtccgccaaaatggatcggattgtcgcgctgtcaggcattcatgagatcgtactgaagaacaaaaacacaggtggcgttagtgccagccaaaacactgcgttgcagacgttttataagctggtggagcgcaagcgcaacgacgactacaaaccactgttagaattcctgctacaattcattgtcactgaggaagacttcagcgtagagttcgaaccgctgtcactgccgaccgattcagagaaggccgatatctttaagaagaacgcagacgcagtgcacggactagtaacggatcaggtcattgatgcgaacgaagcacgtgataccctgtccgcgatggttcccgaactgaagttgaaaggcaatgcgccggaacagaaaaagttaccggatcgcacgccagggtcaggcaagaccaaaacgcaaagcacgcagatcctgaacaacaccgaggagggcggcgatgaaagttaacggcagaattccaaactggcgttatcctgaagcaagcgagcgggatttatcccgcttgatgcaggacgcgacaaccgatctggtcgtggaaatgcgggatcggttagaccgcctgaagttcgacgccacggcggaggaaatcaacgaggcggaagacgatatcaacgaggcgtcgatcgcgttctttgctgccgtcattgcggcgttggcctccattggcctgactatctaccgcttcaactctaagcagtggctggttattgcgctggcggctggtgggcgcgataatgaagcggtcatgatgctgaaggagttcggcgctggtggttatgagcagtggtatcagcaggcgctgaagaaatggcaggataccgcaaaggcatcaatccagaagttaacagccgatatcgtcgctgactggacaacgaaagttagaaccgccaacaacatcggcaagactcgcgaacagatcgatgaaatcatcgagggccgatacgccatttatggcagttggtcgcgcaaccgggcgagcggaattatcggaagttttaacagtatgttgatgatgcagcgactaaaagatgctaaagtatcgcattacttttggttcggtatgatggacgaccgcgaacgcgaaagccacatcaaactagaaggtaagcgacgccgcgtaaacggtgacggcatttttcccggcgaggagtacggttgccgttgctgggcggttcccgattttaataacgtagaggaattacaatgaaaagagttcaaagattcgacacggtaaaggtgaaggcccgctttgatgaaaacggctttctggtcgataccccgatcgttgcgcgtatcggcgcacagacctaccagaccccgaacggcccgcgcgttgagtttcgcccgcgctccgaggtgttcgatgctgaatcgctggcgtcataccagggcaagccaattactttgggtcacaagatggtcaacgccaaaaacgctaaagggctggtggtcggatcctgttccggcgctggcaaagaggacgggatcggggttctggttccggtgatgatttacgacggggagtcgatcgagcaggcgaaacagcgcgtagcggctgaattgtccgttgggtacacctcgatcgatatcgacaaaaaaggctggggcaacaacgcgacgggcgaatactacttcgatgaagacctaccggaaaacttcgaagaactgaaaaacgattccgtctctgattgggttcgctttgatgccgtgcaaacgaagattcgcgttaaccatgtggcgcttgtttttcgcgggcgtgcaggaattgcgaaattaaatcttgatagtgagcaagaatttccctatgatgacgactcaaaccacaaaggagctaaaacgatgattatcaaaattgacggcgtagacgtcgaagtagccgataacgtaggcgcacatattgctaaactggacgcacagatcgcaaccgcaaccagtcaggtaacgagcatcaccgcagagcgcgacgcacttcaaaccaaagttgatggcattgaagatgaagtggcggcacgcgttgccaaaatcaaagccgacgaagacgcgaagcagaaagttgtcgcgatcgtctccgccgctggcatcaagtgcgacggcctggacgttaaagcgatgaaagttgcttacatcaaagaagcggatggccgcgacttgtcagataaagaagattcgtatatcgacgcttcttttgactttatctccaattctgataagatggcaagcaatcgctctaaagtcttcgccaaaaaagaagatggtgagcaggaagacaagaaaggcgcgccgaaactcgatggttctaacatcatcgacccgcaagccaaattccgtaactaataccgtgcggccttcgggccgctacaaaatccaaatcaaggagatttaatcatggcaattcctgcaacctatacccgcaagcgcgatatttgcattccgggccagatcgcggatacttcgctgtacaacatcgacggcacctgtgccgctgcaaatgacattttaactggcgttctggtcgcgttgtccggtggcgttgttgatggtcataaagtggtcgataccgctaaaactgctgatgctgttctggtgggcgtaaccactcattcccattaccaatcgccggaattcaaatacgacaaattttccgccgtaaacgttatgacgcatggccgcgtgtggtgtcgcgctgcatctaccgtaaccgcagccgattgtgcttttaagtcgctggtaactttcggtgatgatggcaccgtggcaaaaggcgatgctggcctaatcaaaaccgggtacactcacactggcgagtggttcaaaaacaaagatggcgtagtcctggtgaaaatccagttaacgcaggacgcaaccgcgccagccgctcccgccgctggtggcgagtaaaaaataggggcttcggcccctttttcatacgttaaaaaaacctttgaccgtttagcgattcgtgctattcttcatctcgttaagtcaaaacacacaaacaggagtttcaaatgactatgaaattagatgcattcgagcagaatgcaatcaaggttgcaatgcagggtatgggcatcgacgctaacaaactcgatgcgcacggtatctggactgtcaatcagcttacccaactcttaaatcgccagtacgaacaggcttacccgcaaactggtgtgctggagcttttcccggttactaccgaactgagtccggtaacgaaaaactttgaatggctggagtttgacggcgtaacctctgcgaaaatcatcgcggattataccgacgacctgccgaccgttgaagcgatggcgtccgagaaaactggtaaagtgttccgcctgggtaacgcgtggtttatctccatcgacgaaatcaaagcaggtcaggcgctgggttccagcctgagcgaccgcaaagcgtctcttgcacgcgaaggccatgaaaccctggttaacgatctggtgttcaaaggttccgcgccgcataacatcgttagcgtgttcgaccagccgaacattaaccgtctgacctccgcaaaatggactacgccggaaatcgcattcagcgagttgcaggatctgatcgagacgatcgaagatgtaacgctgggtcgccaccatgttaccaacatcgtgatcccgccgtccaagcgccgcctgctgacgcagaaaatgccggacgttacggaaagttacctcgcgtggttcaaagagaactacccgaatgtcaccatcaccgcgattgcggaactggaagatatcgacggcgcaggtactaaaggcgtgctggcatacgaaaaagatccgatgaatatgtcgatcgagatcccggagcgcttcaacatgctgccgatgcagccgaaagatctgcatttcaaagtgccttgcacctccaaatgcactggcctcatcgtgtatcgtccgctgaccatcgccattctttctggcttgtaattagaatggcccttcggggccattttttattgttgcgaaaaacctttcattgtgtttaaatcaaacctcaccaaaacaggagagatataaaatggctaaaaaagatactgctaccatcgagccggaaatcaacgaaaagccggaaacctcacagccggaaaccgcgaagccggatatggtaacaatggaaaacgtgggcgcttgcctgattaagttcgacggcaagaaagtgctaccgggcgaaaccttcgagatcgaagagtctcaagttgaccgcttccgccacgatatcttcaaaggccgcgtagaattccacgatgatattcgccgcactcgcgactacatcgcagcagtgaaagcgaaagcaaaaaccatcgtgcagcctacgagcgccgaataaaaaaccaacaagggcgctacggcgtcctttttcatatctggagaaagaccatgaattacacgattcaagatgtgatcgacaaaatgcgcagcctcgcgccgccgcttaaagaagtaccggaagaactgttaaccgcgtgggtggtgctggctgaggaattcgtatgcgcgtctaagttcggagattcgatcattacagcgctggcgctgatgaccatgcacctgatgtttctggacggagcaatgaagcaggaaggcgaaagcgtggaatcatactcgcagcgtgtagcgtcattcaccctgaccggggagttttcccaaactttcgatcgcgtgtcttctgcgagtgacaacgaaatgctatcaactccgtggggtaaaatgtactggcgcatgctgaaaatgcgcggcggcggctttggccttatgaccgctggcggtcttcatcgttgcggcatgggaggttaaacgccatgaactacaaagcaattcaggcccgcgcgagtgcgggcattaagtttttcagtgatgccgatggcgtgtacaacaagtacaccaaaggcgctggcggaggcatcgacccggaaaccggggaggatatcatccctggcgaggtcatgaccacaatcaaaggcgcggtgcgggatatcaaagatcgcgatatcaatggcgaaacaatcctcgctggtgacaagcgcggcttcttcactcacgacgtaccaatcatggaaggtgacgaaatcgacgttgacggcgagcgttaccgcgtagtgaatgcccgcccggtgaaacctaccggaaccgttgttgcctaccgccctgttttgcgaagggtggcgacttatggctaactacaccatccgggagttcactggtgctattgatgcatggtgcaaggcggctggggacgcgctggaggacgttgtacgcatgacgtgcgaggatatcctaaaggatcttgtgatgcgttctccggtcgatacaggccgcttccgtggcaactggcaaatcacttttaaccgcgcgccgctttacgcaatcaacgcatacgaccagaccggggcgaagactatccagaacggtaacgcgaacattgcactgttcacaaagggagccgggattacttcgatctggttcagtaacatgctaatctatgcgaacgcgctcgaatacggacactcaaagcaagcgccgaatggcgttatgggagttgtcgcaattagattgggcgtttatgtgacagaggcaatcaaacgagcgagggcgaaaaatgcactatgatattgcgttaaaatgtaaggcagcagcggccaaatttgccgccgataacggaatgaagatcgcgagcgataacgttgactttaagccgccagccaacggcggaacgcaccttaaattttcctacatcgaagcggattcccgatctgttagcctttccagggagtgccgtgtttacctggggctggttcagatcgatgttatctttaaacccggcatcggcaccgacgcagcaaggttaatcgcgcaaaatgttgcaaaatacttccctgaaggtaaaatcttgggcgatgataaaattaacctttatgtaagcgagtgggcagaggttcacggagtgcagaaggcgcaaaccgggtggttcttccccgttcgctttacggtaagatgtgaacaaatggaggcgagcggttatgcacttacctaacgggagcaagatttttattgaggccagcaacgagagggagtacgattttaagtggcttgacacaactgatgttggcatcccaaacacttatgctctcgtgttgaatcaggcggctggtgtcagtgcttttggtgttggcgatatcgtagtaatcaccgagtgcgataacaagctgattgagggtaatgtatactcgatccgatctgttaatggggatgtttcgagggttagggtatggcctgaataccgagctaatgatttgccagttggtaattacatttcatcgcccggaaaggttcgtcgcatttcatcctgggcggaactgccttgcgtgcagtcaatcgacaaggaaggaaacgaacaaaactggtatacttaccagtgcctgagtagcggaagggaggagagacagaagacgacgaaatcagcgttgtttatgtcctacgtcatggcgcacgatccgggaaatccggcgtatgatatcatgaaagcacatgagcgagataagtcattaatggctatgtatatgcacatcccaagagcaaaggaaaaccgctattggtctggtaacgtctcattcgatgacattccatcaacgacggtaaacgaaatggagacagtggcgttacgcatggcgattcgaggcgcttataatttcttgccatcaagctaactagcgggcataatggcgaggttaatcaaacatcaaacaggagtattgaacatgcatttaccaaacggtgctagagtcttctttgagaagtcacgcggagcggcgatcccattcaccgcaatgaccaatgacgcgttaaacccgaaaatcacagttgctgacggaaagctgaagccgaaagatattgtgatctttaccgattgcacttggggcgactttgttaacaaggtggctcgcgttaaagcggtagcggcaggcgtcgcaacgctggaggagttcgacacatccgatactaacaagtatcctaccgccgcaaccggaagcgtgagcgtaatctctgactggatcgaaatgccatgcattcaggatttaggcaaagacggcaacgagcagcagtattataactaccagtgcctgagcgacgaacgcgagcagtccgaaccgacctacaaatcggcggtaacgctcaactaccaatttgcgcatgagtacaacaacgcgatctacccgatcctgcgtgctgccgatgccagcaaagaggcaaaagcgatgtacatgtacgtaccgcgagcaagcgaagttcgttattggtctggcgtcgcctcctttgacgatatcccgtctacggctgtgaacgaaatggaaaccgtcacccttgacattgcgctgaagggttcgcacgtcttcctgcctgcgtaactggcaaataataactggcggggcttgtgcctcgcctttttttatgcataatagcattcaatacataccaatcaggagattacaaaatggctaagtttaaaattcgtattggcggcgaactcccatccttcaaacttccggtaactttcacttgccccgatggcaaagatgcaaccatcaacatgacggtaaaacatcactccaccgatgaaatgaaggagttttatgaaagcgaagaaaaagcgccgaaaggtaacgtggattttatccgcttcatggccgaaggctgggatctggacgaagaatttacggatgaaaacatttcttggctgtgctcgcattacccttcctttgtcatggcattgcctcaaacgtacatggccgcgcttgccgggcatcgtgcaaaagtctaaggcgggctgtttatctgacacttcagcctgagttaaccgatcgccagcttgctgagtatggtttacggcgatcggattacgaggctgatttagaggaaattttcttcgatgagcagaccgcccaaagttggcaactattccaggccatgcaaacgcaatggcgcattgggatgaatggcccaacggggctggactataatacattgcctatgttctttgaattgtataaaatcgacaatcgagaagcggcattgcttgacttgcagatcctggagggtgaatacctcaaacagatctacaaaaaatcacaataagcgcctacgggcgcttttttcatatgggggctaacatggctgataaagtagctggcttgacgttcggcgttgacgtgtcgcaggttgacagagcggtgcgatcacttgccgaactgaagaaccaaagccaacaaaccggggcgggtcttcagtcgctggcggacgctgagaagcgcgcgacggcacagactgaggaaatgaaccgcgcgttgcagaaccaaaagaaaaccacggaaaaggccaagaccaatttcaacaacatcgcgggcgctatcgatcccacgatctcgaaaatggctaacttgcgcaaggcttcggaagaactggataaggcctggcaattgggccttgtgccggacaaggaattcttccgcctgggcgctgtcattgagtcgaccaccaacaagctgagacagcagcagttggcgctaaccgaagaaggccgcgcggcaattgctgaggctgaggcgaaacagaaggcaaccaacgccgggcgtgattttgtcgccagcctgaaacagcaagcagactcgatcggcaagactcgcgccgaactactggaaatgaaggcggcacaattaggcgtttcaactgaagcggcaccgttcattaacgccctgaagcagcaagagcaggcgttaaagaaacagcagaatgctatggggcttgctggaatttcagcaggtcaatataaaatggcgatgcgccaacttccggcgcagatcactgacgtagtaacgtctcttgcttccgggatgccagtatggttagtggctattcagcaaggcgggcaaatcaaggatagcttcggcggtatcgggaacacgttcaaagttttgttgagctacattaacccgctaacagttggcgcggttgctttaggtgttgctcttgcggccatcgccaaagctgggtacgactcctggaagtcacagcgagatctagcgaatgcattggtgctgactggtggttatgctgcaacaactaccgggcaaatcaccgccctaaccgatgaaatcaacaaaacatcatcggctactgtcggaagcattcaggctatcgcaacgtcactggctcaatctggaaaatacagcatcaaccagattaaggcgatcacgaagactacggcggaatgggcggcgcagaccggggagagcgaaaagaccattactggttactttgactctatcgcaaaggatccggttaaggggcttgccgatctgaatgagcagtttaatttcctgaaggaagggcagttaacctacatcgaatctttgcgcaaaaccaaaggtgagacggcagcagcggaagcggcaacgaaactctttgctgacacgatggataagcgcctgaaggatatcgcagacagcgcaacaccgcttgaaacgatgtggactgacattaaaaagtgggccgcagactcctggaagtgggtaggtgatcacaccgtcggcgcgctaaaccttattgttgatacggtttcatctatcatcaacgttatcaggaaactgattgcggatggcgacgccatgatcgcacaattcatcgttgatgcgggtcggcagttgcagaaagtgcctggcatgggtgactttgggaatgattttcttgcacagcaagaacagctaataaaggattccaaagccaaatcagcggaactggcgaagaccattgcggagcagcaggcaaggatcgcaaaaggcgagatgggttacatcgacgccgcaaagaacaggacgttatctggtggttacagcagcgcgacaaaggataaggtgaatcaggaagaaaaggatatcctgaagaaccgaaacgccaggaaggagcaggcagacgccggggttaagatcgatgaacagtatcagtccgaattgctgtcattgcaggcgcagttgaaagtattgcagcagcacaaagggcttgacgacaaaatcagccagcagcgcaaagactactttaccactgtcgcaaaattccaggtgttggaagaagcaagcgccaagcgtaagctgacgcagagcgaaaagcagatgttagccaataagcaaagtatcatcgctatggcggaacagaaagcgatcgtgggcgatcagattgtccggcagcagcgcctgaacgcattgcttgacaagtcggtgaagtatcagaaccagatggctgagaagacaaaagcgcttcaggataccgccgggatggggagtaagcagcaggagcgctacagggcaaacgcgcagatggcggcggactggaagaataatggaggctcgcttgacgacgcccaatttaagcagatgcaggcagcaagcgaacagttttacgcgcagcaggatgcgcagatgcttgactggaaagcgggattcacgcatgcatgggctgacattggcgacgaagttaatgacgtgtactccaatatcggaagcatcacccaaaacgcatttaacggaatggctactgtgctaactgattttgtcatgactggtaaggccagctttagcgacttcgccagaagcgtgattaatgacattaccagcatgttaatcaaaatggcgctgttcaatgcaatgtctgctgcgttcggcggtggcggtacgttcagcttcgccagcatgttcagcaaagggttcgccaacggcggctatactggcaacggtggcaaatacgaacctaaaggcgttgtgcatggtggcgaattcgtctttaccaaagaggcgaccagccgattagggccggaaaatttatacaggctgatgcgtggctatgcttccggcggtctggtaggctctaacggctcgtcaggatctggtgtgacgaatggcgggaatgttgcggcatcggcagcaatggtttttagcatgggtgacgtgaacatcacgatgggttccggtcaggatagcaagggcttagagcagggagtaaggcagatcgtgaatgatatgttcacggaggcactgagccaaaacggacgcattgcgaaatacgtaaacgagaaaacgaggggttaacagtggattctttttcctggtgtactcaaattcaaggaggggcggcgaaagtcgccgtttcaaacaacgttcgagcggttagtttcggtaacggatacatccagactgcatcgagtggcatcaacacaaatcgccggacggttccgatcgtttatggcggaatggattgggaggaggtttatgatttttgtcaggatcacgtaacgaagccctttatctggacggcaccagatggaagaatgggtgtattcgtcgtaacggcagactctgttaccctcgcgccgcagggcggtgggttatgcgaagtaacagcagagtttgcggaacggttctcttcagccggatagcacaaagcgccctttacgggtgcttttttttggcctatgatctggagtcgacaagaggaggaaatttatatgacaactaacgtttcaaaagagtttgcgaactgcttgcaaaagctgttccccggcgagatcttaacgctgattgacattgacgcaacaaagttcggcgggcaggtctaccgattccacaacgagaatatcgcctactcaaccgaagaacttttggcggcggttaacggcggcacgctgacaccgaaggcgatcacgtttcgcggtgagcaatacggcccgcgcccgttcgggatcggcggtattgcaatgtcaagtgacggcacggtagaaaagccaacgctgacggttagcaatattgatgcgcaagcgagtgctcttattcgctcctacaacggcctcatgcaagcgaaagttacggtgtgggttttggtcaaggatttgctgaaagaagatggcaacgtggctgatggcgattttcggcggttcgtttactatatcgaaagacctaaacaggttgacccgcagaaggccacgtttgagctaacatccgtcttcgatatggatggcttgatgattccggcccgccagactcaaaccgtttgttattgggcgcaacgcggctggtacaaaaccgggaagggatgcagttacaacgggcaaaacggatactttgacaaatacgggaataaggttgatgatcccagccaggatgtttgcggtggccttgtttcgtcgtgcagattgcgattcggaaatgaggctttggattttggcggttgcgctactgcaaccttgaaaagcggacggtaatatgttaactccaaaaatcaaaatgcagatcatgcagcatgcgaaggaagtttacccgcatgagtgcgcagggctggtaacgcagaaatcacgcgtgcagaaatatcaccgactcgataacgtttcgccagatcctgagaacgaatcaatgccggacgaaacacagtacgcgctggcgtcactggaaggcgagccgatcgccttcgttcactcccacactggcgacggggcaaccaccgttccgagcgccacagatttatgcttctgtgatgaatctggcttgtcgtgggttattgtgtcgattccagaaggtgatatgcggattatcgaaccgaagcgcaggccgctgattggtcgcccctgggctttgggcgcgtatgattgctacggcctggtgatggattttcacaagcgccacggcgtcacgctgactgaccgccgcctgccgttcgaatggtggaagccggaatacaaagaggatctttaccgcgactactggcgcgaagatggattcatcgaaaacactggagatcccgaagttggcgatatgattatcttccagcttcaggcggaaaagtggaaccacgctgggatttacgttggaaacaataatatccttcaccacgccttcggcaagctatcgcgtcgggatatctattccgggtggtatgagcagcacaaggttttaatttgcagacataaggatcttaaacatggcatcacatacaaagatgattaaactttccggctcccttgggcgtcggttcggtgtcttccataacctcgcagtcgattcagtcggcgaatgcattcgggcgctatcctaccaggtggaagggtttaaagccttcatgcagagcaaggttggttctaacatgcgctttggtatcgtcgcggacggaaaaccaatcagcacgaatgactttgcaacgtttgccgtagcgaaggaaatccgaatcatccccatcccgaaggccagaaagaacggcggattgttgcagatcgttatcggcgctgcgattatggttgcagccttcttcactggcggtgcatcgctggcggcaatgggggcgttttcatcggcggcgtttatggctggcggcgcaatggtcttgggtggcgttatgcagatgattgcaccgcagatgggcggcaatatgcgagcgagcgagtcgccggaaaataaaccgtcgtatgctttcggagggccgattaacactacggcggcaggttatccaatccagttgccatatggttacagattggctggaggtgcgctgttcggttcgggatcttacgccgaagacaacaactaattaagcgattcgctttttagcctgggggcatagcctccgggctttttgtcgtgtacaattgcaaaactattaacaggaggctaaacgatgactaatatcaaggcccgcaagggcggttccagccagccgcgtaccccggtagaaatgcctgataacctgatctcgaaagacaagatcaagttattgctggcagtttctgacggtgaagtagtggatgacttcagcctgaagcagttgcatttcggcggcgttccggttcagaacgaagacgggagctataactatgagggagttattgcagaatttcgccccggcacgcaaacgcagagttacatccagggcttcagtgaatcaagcgctgaattccaggttgcacgcgacgttacctttaacacgccgtacactctgacggtatcgaacaagaatctttctgctatccgcttccgtctgttatggccccgcgtgctgacgcaaaaagataatggcgatatggtcggttcggtcgttgagtacaagatcgaaatggcggttgacggtgcgagctatcaaacctacctgaccgacaaaatcgacgggaagaatacgactggcggttacgatcgcagcatccgcgtcaacctaccgcaagacttcacgtcgcaggtgcttatccgcgtaagccgaattacgccggacgctgacggggtgaaggtggtcgatgccttccaggttcagtcctacgctgaggtgatcgatgcaaaattccgctatccgctgacggcaatgctttacgtcgagtttgatagcgatctgtttcagaaccagatcccgacaatctcgctcaagaagaagtggaagattgtccaggttccgagtaactacgaccctgttaacaggacgtatgccggaacgtgggacggaactttcaaatgggcgtggagcaacaacccggcctgggttctttacgacctgatcatgaatcagcgttatgggttagaccagcgcgagttagggatcccggtcgacaagtggtcgctctatgaggtgtcgcaatactgtgatgagcttgtgccggataatcgcggcgggatggaaccgcgttacctgatggatatggtcgtgcagtcgcaggtcgaagccttccagttggtcagggatgtttgttccgcattccgtggaatgacgttctacaacggggaaagcctttcgattatcgtcgataagccacgcgatccggtttacctgttcactgctgataacgtcgttgatggcgtattcgtgcgaacttttccgagcgaaaaaacgatgtacacgtcgtgcaacgtgatgttcgacgacgaagagaaccagtacgaacaggacgttgaaccagtattcaacgctgacgctgcaatgcggttcggtcacaacccgacaagcatcacggcgatcggttgcaccagacggacagaagcaaaccgccgtgggcgctggattctgcaaacgaacctaagcgcaaccaccgtttcgttttctactggccttgaaggtatgatcccgtcatgcggcgatgtgatttatgttgcagatccgcactggcaatcagccttcaacctggtgctttcggggcgaatcatggaagtaacgggaacgcaggttttcctggctttccgctgcgacgcgaaggctggcgatacgctgattctgaacactgacgacggcaagccattacgccgaaccattgccagcgtatcagcagacggaaaaaccctgacgctaaacgtgggatataacttcgacgttgcgccggacagcgtattcctgatcgaaagtgaccaactggcggctgaacagtacgttgttaccaggattgagaaggggagcgatgacgacgaatttacttttgccatcacagctacccaatacaacccgaacaagtacgacgcgatcgacaacggcgtaatcactgacgaccgcccaacgtcggttgttgacccggattcaatgggagcgccggaaaacgtgtcgattagttcattctcacgcattgtgcaggggatgagcgtagagacgatggtaatcggctggtctgccgtgcagtacgcaaaactttacgaggtgcaatggcgtaaggatggcggcaactggaacaacgtgccgcgcacagcgacaacgcaggttgacattgaagggatttatgctggcgaataccaggcgcgcgtaaggtgcattagcggcggcaatatcgcgtctccgtggtctgctttggctagtgcatcgctgaccgggaaaattggagcgccgaaagggccaattaaccttttcgcgtcggataatgaaatctttgggattcgcgttaagtgggccatgcctgaaggtgcagaggatacggcatacattgagctttaccagtcgcaaagcggaaccgatcaggatgcaagcctgcttactctgattccttatccggcggctgaatactggcactcaattttgcccgctggctatgtgaactggtacaaggcgcgaagtgtcgacaggatcggcaacgtttcaccctggactgattacgctcgcggtatgtcatcgactgacgttagcattatcacagatcagatcctggatgaaattctggatagcgacgccatgaaggaattgcaggagagcgcacaggacagcgcgtctaaactcaacgactacgcgaacagcatcattcagaacgcgttagccaacgatgcagacgtcagagttatgcgcaaggagaatggcaagcggaaggcggaaatctcgcataccaccgtgctgatcgctaacgagactgaagcgagggcggctgagatcacacagcttaaaacgcagattgatgaggatatcacgtcgcagattacgatcctgaacgaagcgctggcagatgaaagcgaaacgcgagcaacccaaattaaccagttgcaaacacaatttggggaggatatggaagcagggtttacgcaggttaacgaggcgatcgcaaacgaaagtgaagcgcgcgcaacgtccgaggcagcgttagatgccaaaatcggcgagaactccgcagcgctggcgcaaaagctggattcgtgggccaatgttgatggcgtaggttccatgtacacaatgaagttagggctaacgtacaacggacaggaatataattccgggatggcgttacagcttaccgcacaaggaaacaacgttgtttcgcaagtgctgtttattgccgatagatttgctatcatccgaaatgcggcatccggcgcttacacgcttccgtttgttgtgcagaatgaccaggtgttcatgaataatgcgctgattcaggatggctcgattaccaacgccaagatcggacagtatatccagtccaacaactttatttcgggccagcaggggtggagcatcaacaaatccggtgcgtctgaattcaataacgttgtcgttcgtggcgcgctgtttgctgcgtctggtaacttcggatttgatggcggaaacggtgtggtaatcaacggtaacggcgtcaccgtcaaccttgacggcggcgggcgaattgttttagggaggttctaatatggcaagcggtttacttatcgatctcaatgatggtaatccggcgatgcaaatcacggcgggcatgcgttgcccgtctttttgcaacctggttgctaacgcgtgggatgagaaagtggttaacgtggatggatatgtgccaggggcgcagattatcgtcatccctcgcgatccagtatccatccagaacagagggacgaaccttgttccaactatcgggatgcaaagcgggtactcgcagaacggatcacagcttacgttttctacgtggtggtcagataattgggggcgtgaccgcctctatgatttgacaatctgccagatcctgccgacggccagcggccaggggttatacattgccgattccaccgactttaccgcaatccccgactcaacgcgggccgggttttgcgtgtgggccggaacgatcacgtttacagggcaatggcgaactcccgataccggatacgaccgcaataagtatatggtgtttgctcgctggagcgcagacggtgtgacggtcgaatatgacggaaacaacatctacgccaggaatgaaacgaacggcgaggagggcgacgctacggttacaatgagggtggcgattttcgccagtggagttgcgccacaggcgggaaccggattgaactttttcaacgcggcgggccaatgcacattctccacggttcgccgtccgtttatcttcaggaaccgattctataacccgtcgtgggattatcaggatatcggcgagggaatgattttgctgggcaggtatggattcagaagccgggtcagtggtgatcggtgcagggcaaaatttgctgggttaatgatgagcggtaacagcgtaagatgtgccagcggcatcacaaaatctaactggacgtcaagatatagtgtcgtccaggatcgattagtcggcatgagcgttcccattattgaaaacatgtattaaaagaaaaggggccaatcggcccctttgttacatcccaagtttctcctcaatggctgatagccgcgcctcgataccccttgcaataaacaagtttaattgatcatagcggaaactgtaacgatccccagcctcctttttacccatgattggattaacgtcgtcctcatagccaatgacaatttcttcctcctcccattcatcatagcaaatgaagccgtagtgcatgggatccagtccgcaagattccatgatctcgatggcgcgctgaacggtcagaccgatgtgctcgcgagcatcttcgccttcttcagcctgtttagccagccatgagtaaatgccaatctcctgagataacagcttcgcggcggcgatctcgttatcggtaaacttacgaacttctgacttcaggcgagcatctgaggtctgaattgccccgttcgctgcgtacacagcagaaacacgcatagatgagttaccgatcgagtatgcattgtccgcccctgggtatataacgccagcgttgctaatgttccaacggtctaccctattggttgttccaactgccgtagttgagaacgtgatcccggcaccagttgccgttgctgagaatccctctgatggggcaaatcgaatgctggccttcaggccaacccaatcattaccatcatgcccaccaaacccgacatagaaagcatcgcctgactgtgacgacccgcgagaactgagcgacccattgcatgagttcgcgcgaattacggtgcttgagccgccaccattcctgggggtgattaagttcaactcatttgatgagttgttaatctgctttaggcctcgaccattccatctaagcggctccgatgccccggaagaaatgccttccattttgtacgttcccataggaacatcatagccgatccacagatcaccgttattgctggtggcaaacgtctgacgacgattatccatcgttgcattaagcggtgttgttaacagcctgaaccagccgccgtggttcgttgccgaacaagtgccatcctgtaagaaatgctgagaaacgtttgagtgttccgtatatgcagaaccatcccacggacgagaaccataaccaccaattagctgaccatttgagcttgcagcattgttagcgccgcgagtgtagttatggaatacagcagacccaccagacgtattttcaatgccgaaagagcattcagttgcgttatcaccaacgaagttaaccccaatcccgttcgtggccgtcgtctccttcagaggcagcttctgcgtcgacgtaacatcaacgccgccgcgaaggttagatgcaccattgacgcggagcgtgcttaacatcgtaaccgcattgctgaaagtggcatttaacccggtaacggtaaagtttgctgcatcaaaaacaacctgcttcgcgctgttcatatcgccattcgggcggaagtacatgccttgaccgtctttcgggatggagtaaacgatcgcgttgttgttattggcccgaactacggcaccgttcagggttagcgtagcgttaccaccagggacggagatcgcttgcggctggctgaacgtgttagatacgttggtgcgggcaaccgtattatcattagatgccaggtaatcaactggcgaattgtacacaattccagttggttccgttgtaatccacgtatagccagcgcgatcgataatcggccctgtaatatatgagtttccggcctggatgtttacgcgattcagccacaagttaggaatgtaaccagcgggagagtacaaataaacatcaaacgttccgttatcattcttcaccacgccaaggctaatgcgttgagatcccggccttccgctaatcaaagcgcgctgtgtaaaccacgtatcaatgttgtcgcttgttaatgccgacgccggaagacccctgcccgaaatggaaaagatatcgaccggaacgttagcagcgccaaatccagccccgccgccgataataaattgtgcaaagcaataagattgcccggcatcttttacggtggcgatcttcatccatgctttaccgctgcctgtttcactgagtttatcgggagcttgcacgccagaaacaagatctactgtgttgttatagatctgctgcgtgttcgcttgagcttgctgtgccgctgtttttgacgccgccgcgtcagtctgagaagccgccgccgcagcttgcgatgatgccgcagcatcttttgacgcttcagccgccgctgcgtttgtcgccgatgcttctgcgtccgccctaacctgatcggccaattcctgcaaagcattgagatcgaaatctttaaagaattccaccgcttcagcaataacggtttcctgtgactgatagtagcgcagcgtttcagaaacatcttgcgccagtccgtcgacggttagcgagtcgcttaacaggatcgcgtaatcgctggacggaacaaccgcgccgtttgtggtgatggcgttaatttgcgtgtcactgacaaccttgttaatcaccgccatctgaatcggcgacgataaaaacatgattgttgagcctgggcgaatgagcgataaggctgattgccacttcgtgccagtcccggtgataacgccgtttgcgtccatcgcggctttgccttgtctgtatagtgccattttaagacctcttttggttggttgagtaacgcagataatagcatcaatgaagcaataaaaaaaggagccttgcggcccctttagttgtcaaatcagaacgggatatcatcatcgaaatccatgccctgattaccaccaccgccttgcggcttcggttgttgttgcggcttaggttgctgaggctgtccccatccaccctgctgattaccgccgccctgctgattaccgccgccctgagttggttcgcgctggctgaattccagttgcggcataatcatttcattgtggctgtaagtcgcgccgttgtgctcgcggtttacgatctgaagtgtccggcaggtgacgctaataaccttgtccacctgcaacgcttcatcgtaccacgcaatcatgctttccttcgcgaagaagacggcgcgatagttggtgtatacagtttcgtcctggccgtcgcgattgcggatcttcattcgctccgacaggtcgaccgcatacatcttccacggcccgttattgttgctgccctcttttacgtaaggcgcttttcggattacccctgttacaacatgcattgtttttcctatggggcggtttcccgcccggttaaattagttgaaagatgagatatcttgtgcttcaggttcaggctttgattctacctgttccggctcacgtttcgcaacctcttgcggcttgccggggttaaatccgttcgctggcgtcacttttagttgcgcctggcgcttcgtgatatcgtcttccgtcaccttccattccgcaggcgtcaacgtctgtttagccagcttgtaaatctcgcggagagattcgaggtcttcgcacgcatcaatgcgttttttgaagtcttgcggcttcatcttcgcgatctctgcgtcatcgtcggcctgcttgatgcccagcgcggcggctaacgcataacggcgagcgtatgaggtcgtcgagccatatgcttgctcaacggttttgctgatcggcatattgaactgaaacgccatccactcgccagattcgtgcaggaacatcgtttcaaggtgcataaccttgtcggtgctggtatccatcattgattgaatgaccataattttgttcttttccagcgatggcccgatggcgtccaggatatcgccgagattggcgtaggtgtttccaaggtggctattcttcccgcttttcttcgcggcgacgaagccagacttcgctttgattaacgcaacggctatctctttgaaactttcagatgtacgcatgacaaactttccttttcctgattggtggagcgcactatatcacaagtgcgccgtagtgtttagctatttgtgccgtatacttccgggaacatgtatttcacgaattgcggcgtgggcaacttcacttccgctgcgttcgattcgtatgacggccaaacgtcatgcttgacgcactccgcgtactggtgaatcacgctttgatactgcttgcgcccgatctcgatctgctgatccgttaacgtgaacgcgagaggcgcgaacggtgattttttctcctgcgtcagcaggcggacaacaaccgggcgtttttcgttgtacgtcttaacgaacagatcgcgctgcaatgccattttgagatagtagcccaggttgaacgccagccgcccgaagtcatccggttttgaggtctgagtagttttgtagtcggtaatcaccaccacttcgaaaacttcatccgggttaaacccccactctttgatgagttcgggatccgacacgacgtcaacatgatcgagacgaacctttaccgggacgccgaaaatttcgccgaagattgacaactcgcgttgcgctgtatccgattcaatgcacgccgcgtgccgtgggttagccagcatcacgtttcgcatttgcacgaccgcatcgaaatcagaatccttgaccagcttccggcctgagttgatggcggcgctttcgtcgcagagttcgatcgcccaccacacgttaacatcaatcccggcgcggtatgccatttccagcaattcggggtagtccttgttggacgtcccaatcaggccacacgctttcaatttcgcagacaatgccgacttcgaagtaatcagatccttaacgtctcccggcgcggtcgctcgcaggtactcgccattaaatttggacgtctcaagcatgcaggtatgggagcaagtaccgaaggaaagcgcggctgtttcctcccgctccttgtatttccagtgggccggggaggttgcgtaaatctcgccgaggcttgagccgctaacgtatctggcgcaccaggagttaggatcgtggtaatcatcgttggataattccgcgttggtgtatgccttaaaaattgcttcagccattgatattgctcctattgtggtttcgttgcgttaagtatacgcatgacgattccgggtgcaaggcaaaaagtgctattcgtcaactggtcaaaaaatgagcgaaatttacgtaagatttagtaagatgcatcttacgtgattttctttatatatttcatgcggttaacccaaatcggtaagatggtaagatgcctataggtaaatattaacaggaaaattgggccgaaatcgcaaagcaaaatacatatacccggagaaaatcttacctacacagatagatagagagagagtaataataataatatagttagatatcatatacttatatatattctatggtgcgatattggttaaaaaatgagcgaaatttacgtaagatgcatcttacctaatcttacttaaagtggtcgaccagttggtaagttgctgaatttttggcataaaaaaaggtaagactgaaattatcaatcttacctaaaatttgttcacgctttaatcagagaagggatgatgccacgtagagctttcgttcgaatccacctttgaagttgtcattgttcggcacgataactttcatatcgcgttcttcagccgccgccagcatatcccgatctttcctgctgcatacgactcgcaattctcgcttgccttcgccgccgcccttccctttatatcggtaggccacgatctcaacgttggacgggatgatgcatgcccacacatcacacttaaacgagcttgcgatattgaagtgcatcgcctccacccaagagcgagccaggtaaattggcccgttaccgccttcgctctgattggttacgatcaccgatccgaaagtcaggtcgccagctaacatcttctcccggccctcctcatcaatgaataagatgttgcagtattcatcgtccggcccgtcttcatgcaccagttgcatcgggagtgcatgaaatagctcttgcctgccgttctcgtgggtttttacgccaacccggtatgattcaacgaactcattttcaatgccctcatagagcgttacaggcgtgctatcgacggcctccgttctgttcattatcgccacgacgcgatcgtgatctgccatcttgccatagtcgtacccgttatcgcgagtaacctgcttgttgcgcttaactacgtactcttgcggaactttgcccaggtatcgcccaagaatgttgatgcactcgctatacggctcgccgctcaacttcattaaccatccgatccccttatcggcaccgcatccgctgcaatatgccccgccgtcgccgcgattctctaatttgtcagtccagcggaagcgatccttgcctccgcagttagggcagtcctggtgtttgccgttgaaatagcgggagtggatgccgcaaatattttgtagcgcctcgcgccacatccccggcatgtatggcaaaacctctttttcgtcgtaaaaatccacgtcataacctccaaataaaaaacgcccacgcgagaatcataacccggtaggcgtttagtagttagtcaaattgtgctatcggactactcgaagcatttcgcggcggtcgcagcggcgcgtaatcggcttgccgttgctgtcgaatctgagatccgggcggcaaaatgaagccctgaagcctttgcagtcattgcggcggtaactcttatgaaccaggtaagcaccatcggctgaaatcatgccgcgcttaatccactgctgaacaacctggatgctaacgcccaactcctttgctgttttggcgatgccgccgtatgcctcgatcaccaattccatccgggtagtcaggcccgcccttacttcatccttcaggacgtaatagcctgtcggcttcttgcggggcttcttatctttcccgcgtgacgtcccgttattgccgttcaaagttctcttgtctacctttgccatttgttccataatttaacctcgcagcactttttgttaaacacgataaaatttgctctgtattatacacgcaaccatgcgaatgacaaatcaggattaaccatgctgacaattgaacaacaaattgaagcctacgcagacaagatcccatctattcaaaagcggttcacggtagggaatatcgttccgtacccttaccaggctgtcgcgtacatcgagacggcgaagcggatcgcgaactatgagcatccgttctacattaaggcgtccgtatccgcaggcaagacaatcatgatcgccatgctcgcggcgcagtgcaaaacaatgaacttgcctatgatggttctcgccaggcaggccgagatcgtgaagcaggattccgaagaaatcagcaatcttgacgtgccaaactccgtttattgcgccgggttaggcacaaaggcggcttacttcccgatcgtcgtcggctccgaaggtacggtggttaatggcctgtttaagatgctgggcgattacgtgccttcagtcctggcaatcgacgaatgccatcaggttgactggcaagacctcgcagaagcgatcgcgaacgatgaatccttcgagtacatgagccgcgcgaaggataagccgtatcgcgtgaatggtgagatcgtcgatgccgattacccgtacaacgaaaagttcgaaacggttgaatttggtggcgggcgcactcaatacaccatcgtaatcattgagttaatgcgccgttgccttcagaagacggggcgagaacttcgcatcgttggctacactggttcggagtttcgcggcgtcattccgatcttacaggaagacaagagccagccgggtttctggcgcgagcagatcacggacattaacacaaactaccttgtcgaattcggttcggtggttccgacaatctttggtgacactgaggccgacggcctgggctatgacctgtcagagtttcacggctccagtcaggacggcacgcaggattttagcgctgaagacttgcgcaagatggagaagaaaatccacgattccggcgaaatgactaagctgattatgcagaaggtggtcgagcgtgcgcagacgcgaaacggcgtgcttatcacttgcgcgggccagcgacactgtaaggaggcggcgagctacttaccgccggacgccacatacgcgatcatcacagagaagacgaactcgaagaaacgcggtgagattctggacaaggcgaaccggggcgagattaagtacatcttccaggttatggccctaacgactggcgttaacgttccgttttgggatttttctgtaatccttcgcaagatcggatctctgacgttgctgattcagcttttggggcgaggaatgcgattgctcaaagactggcagaaggaagcgccctattcgtgggtgaaagaagatcaccttgtctgggattttgccggaacaatggatgacctgggccagttgtatttcgatccgattcttgagcaggcgcagtatcagaagcgcaagagcagcaagaacggcccgaaaatttgcccggtctgcaaaggcgaaaatagcgagtacgcccgccgatgcatccacaaggatagtaacggcaatcggtgcgagtatttttggacgtcccagcgctgcgaagaccaaaaggatccgaggacggggaaaatcaaggtcaagggatgccacgctgaaaacgacattgtggcgcgccagtgcagatgttgtggcgtgcagttaaaggatcctaacgacaacctcaccgggaagcattacacgcaaaatgactggtatcaggttgtaggctttgatttgggattgacacgaaaccaaagcgggatcatctttaattacgtgttgctcaaccatgacggcgagcggttcacggccagggaaaaattctttcctgagtcagaaagcgcgatttgcggtaagttgtggcgacaaaaggcagtcttccagcatgttgatgatgctgtaatgcgtggcaagttgggcggcatgaaaaacgcccgcaagatcctggagtatgcggaatacttccgcgcgccgaagcgcgtaacgcatcgcatcaacggcaagaaggaggacattatttcccgcaaagactttggaggcgaggagtgattacagacaaaggggattacctcgaatattacggcgggcctgtaaaggcttgcccgcttgaaaaaatcgaccagatgaacagcgtttcgtggttgcgttacgaataccccgattatttgttctggcatacggtcaacgagggcagcaagcacaaggcgagcgccgttgctgatcatcaaatgggattgctcaaaggcgtaagcgatatccttgtgctgattgggctgggcggcaaatacccgttcgccgccattgagctaaagcgccagggtaaatcccaggcgtcgccagtgagcaaggagcaacgggaattcctcgcagccgtccgaagtcgtggcgggttcgctgccgtggcctatggattcgagcagtttaagatcgcgtttgaagacgcaatcaaatagcactttttgttaaaactacccggcgcgagtcgggtaatattctcccatcgaaacgaatcacggagaaacatcatgaaaactttattagtcgcaattgtcgctgtaatcactttgtcaggttgcacttcatcaccccgccccgatggctggtgcgcaacctcaacgcatggaatctgtgttgccaaatggaaaaacggcgtagttgttccggctggtgaagtcgatgtgcgcttcgcgggccttgaaaagaacggtaacgagatcagcggaaccgtaaccaccacaggtaaggaatggtaaaatggcaaaagacacccaagacaaagacactcacgacgcgttcacgacgtttgaacagcttgaacgtgaaactttcataggcaacgcgcttgccactggcggacactatcaagccgtcaagcctgataaattctaccaggtaacgggcaaccgctacgccgggagcaagacgccggatatcgtccgcgacaagtggtcaaccgatcgcagccttattgcttacatggaggagcgttacgggccatacgacctggacgccgccgccgaggaaagcaacaccgtctgcccgaagttttacgacgaaaagacagattgtctcaagcgctggtggggtaaaaacaagcacgtatggctgaatccgccttactcgtttccagatccgttcgtgctcaaagccattgagcagatggagcatgacaaccagatcgatattttgcttcccggcgacaactctacggcgtggttccgcgacgcacagaaggcagcggctgagatcatttggattgtcgcagacgtcacggaggatgaagacggaacgcaactaagccgatccggtcgcctggccttcatcaacggcctaagcggtaaaccagtcgacaacaacaacaagggcagcgtgatttttatcatgcgcaaactcaagccgggcgaggagcaaaaaacgttctacgtcccggtaagcgaaatctgcccgtcattaactaaaaagcgcatgcgcaaacgtgggatctgaaaaatggaacagcttgaatctttcaccgaatacctccacatcgtcgttaccctgctggacaagtacggcttcatcggtacggatgaagaaaagatggccttcgccgatagcatcgacggcacttatcaagagttcatggataacggcacgccgcttgctgactggcccgcgattcttgagcgcgaattgctggattttcgggcgcgtgaaggtgcggaatatttcgcgaaacagcactaattgctaaacaatgcccgccgcgagcgggtattattgttccatcaaccaatcaggagctaacgccatgaacaccaaaaccatcgccgacaccatcaagatcgcacaagttaagccgcacatcgtatcgcgccacctgattaacctttctcgcctgtgcatggccgactacgtggcgaagcctttagagaatggccttgatggtgaaatcggcgcgatctacttccgagcagcccacggcatcgaagaaattcacatgtatgagcagatggcggaatgcttctgcatttacggtgacgaataatgattgtcgaatctggccgcgctgccgtctggcagcatgccaaagaggctggcattagtgacgatatcgtgatgatcgcaaagtatttcgatatcaaggatatctccattgtgttcaatgggaaatttacctatcttcatgagcgcccactgaagcgcacgcgtatagcggttgcgacgagggcggaggccgacgctctgaagatgttcattaatgagtcgaagcagaccaaaaaatattacaagtagcgggagtgttgagaatgcgatatattgcgatcctgattacggcggtggttctcactatcgcaatctttaactacgcaattcaattgggataaattatgcaacctaaaattacagacgaagaatttttagccgcccgcgaggaaggcaagacctaccgcgagatcgccgaagagttcggcatgaacgttcgcagtgtggagcgtcgcggcgttcgacttgcccgccaggggcatttgcacggtaacaaccacgtagcgaagcacatcccggacgggttcggggtcaaaggcacatcgaccatgattcgcgcgaacggtgacgaagttgtgcgatgggtcaagtcagaagtagaccgcgaccgcatgatcgctttgatggaggcggcgcaagcatcattctgcgaagacctaccgcgcgctgaaccgcagccgaaggatgaatcgaagtttttcattgaggatcagcttgccctgtatccgatcttcgacttgcacatcggcgcgatggcccacaagcacgaatgcggcgagaactacgacaccagcacagccgaaagggttcttaaccgcttctttgactattccgtttcggttgccccgcagtcgaaaaaggcggtcttgctggtcggcggtgacttccttcacagtgacggcctggatgcagtaaccccggcaagtggtcatgttctcgatcaggatagccgttacgcgaaacttgtctatgtggctattcgctccttgcgccgcgccgtgtcgctactgctgagtaatcacgcggaagtagaggtgcaggtaatcgaggggaaccacgatcaggctggcatgatctggttgcgtgcagcgctcgcagcgttctatgaaaatgagccgcgcgtattcgttgacgtcagccctgcgattctgcatcgcaccgtatggggcaaaacgatgctgggctacactcacggccacacgatgaagaaggcagaaacgcgcctcgccgcaatggctactgacttccgaaaggagttcgggcaatgcgactacatctacacgcattcgggccattggcatcaccagaccgtcacggagcactcgttagggattgacgaagtacacggccagttaggggccaaagacgcttacgccgctcgcggtggttggcgctcatatcgccaggcggcggttattctgtacagcaaagaatatggcgaagtaggccgctttatctaccgcccgaacatgtaaccacaacggccccgcgaggggccaacaaggaaaaccgatgaatagaaatatctgcattttcgatctcgatggcacgttgtccaatggcaaccaccgtttgcacctgctgccgaaaaaagatctccacctaaccgaaagctggacggcgttcaacatggcggctggcggcgacgctcccattacggacacgatccgggtaatggaggccatgcgcgcagcaggatttatcgtcatcatcctgaccgggcgaagtgatgaggcacgcgagatcactgaaaaatggctggtgcaaaatggcgcatcgcattacgacctgctgattatgcgctccgcctccgacaaccggaaagatacggttatcaaagaggaaattttacgcaagattggcattgagcgaatcgttgcggcgtgggatgatagccccactgttattgcgcacttccgtagcctgggtatcacaacttaccaggtctgcgactacggcgaaaaccttcacgaccatctgaaatctcatggagtagacaaatgaaaaatgtaatcatcctcaacggcgcgccgggcatcggaaaagacaccatcgcggaaatcatcgcccgcaaatgggagtatcggatcctgagtttcaaatcaccgatgtttgacattgcgcgcgccatcctgggtgcaaccgactttgcccgcttcgccgtccgttaccacgaccgcagccggaaagaagtcaagtgcgactttttaggcgaccgctcgccgcgtgaattcctgattcacattagcgaaaatttcgtaaagccgacgttaggcaaaaagcagttcggcaagttgctttgcgattccgtcgtgaattcgcctgttagttgcgtcgtcagcgacggcggatttgacgaagaagtagagcacatcgcggcgcatgatagcgtaaacgtctttgtcgttcgcctgcatcgtgacggcatgactttcgagggtgatagccgcaagcatattagccgaccggatctgatttgcgaaacttatcacgaattcgattttgatatgacgactggcgagccggaagacgacgcgcaaaaaatccttgatatggtttttgaagggtattaatattctctacgtaatgcctttattatcaccgccttaaactttgggagccttaacaggttcccttttttttgttctttatttggcccaacgcatatatcatcgcattatcacttaactaacagaggttgcatatcatgcgggaattcatcaacgcggcaaccaatggtagcggcggtgttaccctcgcaggctctgcgaccgggcaacttatcattgcggccattggtttatttttcatgattctattcggctccttcggcgcgtggttgcgctggcgagattcaaaggcgcttcgtgaagcgctggaagccggggatatcaaaacggcggtgaagatcaggagtaaataacatggggattaaaacgcgggttacattcgcggcggcgatggcgatcgctgtcgccttcctcccaaaagtggaggacacgaaatacaaagtttataccgatatcgctggcgtttcgacggtatgcgaaggaatcacggggccggacgtaatcaaggggaaaacctatacccggtcagaatgcgatgctcttttggcgaagcatatccaggtcgcaaagcgtgtagttgacagcaaaatcaaagtggccgtgccggacaccttcagggcgtcgatgtacagcttcactttcaacgctggcggcggcgcatactccggcagcacaatgctgaagttgacgaaccaggggcggctatatgaggcgtgcgaacagctttaccgctggacgtactatcgcaacccgaaaacgggcaagatggaaaaatcgcgcggcctgcataatcgccgggatcaggaattcaatctgtgcattaaggatctaaaatgagtagcttaaattttcagcgagcattggcaatcggcttcatcgtgtgggcggttgcactggtttccggttgcgcttccagcgtcccgatcctttccgatctggtgggcagcaagccggatatgacggcgcaagtcggtgcggagaacgtgaaacaggcggttggcgtgacgaacaaaacggacacgtcaagcaagcaggaaacgaccttcaaagaatcggcagttggcaaggttgacacttccaacaaaaaggcggtgacgacctccagcattcacgcgaaccagattacggcggagaagatcgagatccgaaacgacggtagcggaagcatgattccgtggctgattggtgccgttggggtcatcatgttcgctgtcggtgttttcggtatgtggcgagagcgaaaaaataaaggggcgtaagccccttttttcatatgtaccgtttgacgtgcagcagtgccacgccatcttcatcattcaacccatgttcaaccgtgtttgtcgcggccatgccttgatatagcaaggtgagcgcggcacgcaagtaattttctggtgtgatctgattcacgcaaacaagcctgtgaacctccgttatcagatcttccacctgctttcccgaatagggcttcatcgtcgagttgctcaatgtgcatcatctcccacatgtatttgttgtccatcccttcaaacgaccggaagttaaatccaatctccctgttatccgggccagtacaccacaccacgccgttttttccgtccaggtatccattcgtatagcttcgcgctaaaaactccttagaaaccattgaggcgaacatacggtgtgacacgttggcggcttttgccatgcgcggcgattcgcggtgcatgtaaacgaacttcgcaaaatcttgccgggtaaattcccggcgagactcgcagaatcggtaaatgtcaaggataaacattcattacctcatgaacgaagggttaataaacacctctgaatcaatcacgcagatgaaccctaattcctccatcttcggcagcaatttttccttaatccttttgcttaccccggactgacctttgaagatcttcagattgcggcacgcgttatagatgctctgaaccgtcatcacgcctttcgcctgcttgccacggctggcgataacatcgtacaccgccttaatctccgcgccctcaccagcgaagccggacgaatcagccgacgacaaatacgttttgctcaactcatgaaacatgatgatggcttcgtcgatcgtttcggttccgatcttcttcgagcgttttccgccaggttgccagttgcggatcgtgtggattaccgacgccaggcgcatcacctgcttatcgaatttacccatcgcaccgcgcagcatcgtatgcgaatacttcccgccgtcgcctaattccggctctaactcctggcgggccttgttcagccgacgcatgcctgcttcagtcacttccagcttgatatacgattccgtcataatgtcatgaatgaggcggaagtaatcagcgcgtaaagacttgtcgatcggctcataggtcgaattcccgttttcgtcaatgaacacacgctcacctaaccgcgtttgctcgcgaaccaaaaggaaacgctctgatacaccgataccgcgagaaccagcttgcatgatggcgtcgatggtttcatcctgggcgattacgcaaatacagcccagcgcgacgaatgacatattgttactgacgtcggaacgtgcgatcgatacgtggcccttatcccacgccttcaacaccagttcgctgttcgtcttcttgccgccgtcgttgccatacgtgatccctaacaggctgttaaccgctgtcgcttcgtccgagataacagcaaagttgccttgccgattgttgattttcgccaggccttccggcgtggtatcggagacggggaaggtcagatcgcacatgctttctaacttctcctcaagttcgtctttgtcttcgaacagtttcgccatatcagactgcgataactctcctttcatggcctgcttgttggcggacaacttcgccatgattttcttgcgctctttcttgcgcgcctcgttgattcgctcaacctctgcgacgatcggatcgatagccagcgagttaatcgcagacttaccagcggaaggcggctgcgacgtaatgacgtaaagcgtcgttggttgctcgctgccgtggtactccacccaaaagcgacccatcatcgcggcggacacggttccgaggaaatgcatataagccgatgattccgggaattgaacggagcgagcggcgttgagcgccagcttgccgacgatatcgtaatcattcgcgatcgagatcgtggggtacttgtccgcgtttacgtcgatatctttcggcttgggccagaaagaaacggagtcgcgatacccgttcgcacggatagcgacgcgcaaggggctgatgccttccttctctgcgatggcaataatatcttgtggggacacgcggtcatttaaaaacatgccttgctcctgattggttaatcgtgcggctaatgataagccgtcttaaatccgagatccagtgataatctaaacgcacttgcaaaatgtgcttaggttatcggggcgcatggccccgaatccgttacaggtatttcgcctcaaacgtggttccgtccgacacgctgaaaccgacttcctcacggtagagcgtccagcggcaaccgtcacggtcgaagatgtacccggcgacgccgccaagcgctcgaccactttccacctggtaacgcttgccgacggtgaaggattttttcaccgggtttttgtggtcgaggccaacgcatttcagggttttcgttttcagttcgataaacgtcgccaccaccacgccgccaacgccagcaatgaacaactcaccgctaatgccgaccgacaagtaaacgcgcttcttcttcagttcggcgctgttatataccatcattgacacgttgccttcgtcgtcaatgcgagcggaataaaggttgttttcctggatattaacagcacggcttgaggtgcatttaattttgattgactttgccattttatttcctttctcccatttcgatatagaggtttaccagatccagaaagtcggatttgtttctgcaactcaatttaaagccaacgtgcgattcgatcttattttgcattgccgccatcgttgcgccgccgttattcatcttcagaacttcgcggcatacgtcagccagttttttagatatcatatttcaccaccgtaaatttagtgtttttgcaagcgccttcgatatcgctaattaggcgattcactctgatattaatcatcgttttgtggtgcatgacgtcaacaatgccgacaaccgctaacaccatgattgaaaagataagagcaccaggcccatacatagaaaatagtgcggtcattactgcgatcatgaatttcattctggttttctccgttgcgtttcgatggaataactatacccgcaattaagcgggtacgtttagcaattcgtgctattcattaaaattcgcctggaacacggcgcgagcgaatccgcgcggagtgatagagcgaagcatctttgttctttcagacttgccgcccaggaatttccacgcccaaaagaaatcgacgccttccacaccttcaggcggtaataaacgtttcggctcaacgaatccgttaccgtgccagatgcacgttttcttcgtgtaattgtcgcagtgcggcatttttgggtgccaaacttcctcatgcggcgcaacatacccgccgaagtcgcgagggtggaaataaaaatccggcttgcgccaaagcgtcgacaatttgccaaccgggttttctaccatccatgggcaattatattggtcgcccaattgctcgatcatcttcgcatcatcggcggctgatagaacatcctgagtctgccgggcgtgcttcaccccgctatgcgctaacagcgtgcaggaagggaaagcgaaaataatgtcaggatccgggatgcccaggatcgtgcgcttcacgtcgaaatctttgtcaatccagatgttgacatactggatttttgcatgctccatgcggatattgtattcgccgtggtcgccggaatcggcgttaaagcaatatacatcgcaaccgcgaattgcccacggcagacccataatcccggaaccgtcaaacatgcaccacacaacgcgctttttcattgtcacctcaccagaaagggatacattcgcggcaaccttcttcaccagtgcagccgcaactattttcttcttgctctaccagatcgtcacgcatcggcagactttcggcatccatatccatacttcccagggcatccgatagcgtcatttcctgattggctaccttgatgcaatattcgcggttaagccccgcatcctgggcggttaagaaacggtgccagtagccatcgtcgtaattatcagccattgcttttccttcggttaaattctcgcaaactggcggcgcatgacttcgaacaggttttaccccatccacgtttaagatccgccaccttgaccttatagacagccccgcatcctggagcctcgcagcacttcatgctttccttcggcctgatgtgatcaggtcgaccagtcagggagctatcgccgggattcttcgtcgaccagaaaagttgcactgtcgcgacctcctcgccgaactcattaacgaacatgtagacgcccttgcttttcagaagcacggtgcaatgatgcatttcgccgttgacttccaggtatgcgcgatcgccttctttcattagcttctccaagattcaatgaacatgctgttcgattccagcgtcagcgtgacgccagccagggaggacggaatcaggcgagcgcccggaaccgtgccgacaacatagcgaccattcgatttggtgatcgtgatctgagtaaagccggattcgcggttcatgcggagaacaacgcgaccgtgcgcatgcaggacggccaggatcgaatcagtctttggatggttcattgtgtaactccttcgtttgttggtgtggggacagtatgccaccatccccaaattctgttttagcaattcgtgctattcgggaacgcaggtcgtgtaatcctggcagatgtagattgtgcgctgaacacgcggcgcggcgtcctccaggctctgaatctcgatatcgttgctgtcgacccggcagggtgttgcaccgaagatgaaataccccgtctgcttgtcgttgatttgccacgccttgctttcgggaaccgtattgacgacaaacggcgtgtcgtcggctttgaagtcttcagggtgacgcccgtaatagtggatgattgcagcagttgccgccgccttaaacttttccgtcacgtcacgggcggcgatctcacgcgagatctggatgtcaacatccggcgcgccgaccatgtaggaaaagctggttgaaatggtaactgttctcatttagattttaacctcgtttcggtggatgaagtcggcgacatagtggcactcgatcgggttttcgatcccagcgagaacctcacagcgcccgttgttcagtaactggcaatgctggcaatccacaccgccaacattggctatcacgatggcgatcccgttgcatgaaccgccgaacatccgatgagggaaggggtaagcctcgcaggtgcaaaccacctccccggccctccgctttctcatgcgctccccttctcgatgcagaagacccaatcgcgagcatcaaccgcgaagcgcgccacgccgtcgagcacgatgaaaactgtctgcccgttaacgcctcgccctttctcgatatcggtgacggtgcggaacaggtcgcttgcgccatattgaattttgtccccgattacgacgtcgccaaatgctttcattttgattctcctgattggtttcgatggggtaatgataccaggcctcgcggcccggcgtttagcaattcgtgcttatttgatgccctgagcaattttatccattttgcggaaccaaattgccagttcttcgagcatctcgaacaggtcagcttttttgctttccatgatggcatcacagatcaggttgatatcgcaagccatgactccgaggtattcaccgtaagcgcgtacacctgcaatgttagaagacttgctatcacggcggcatttctgcgctttgtaaatcaggctcatgattttggaagtttctttggtcaggatatgtacgttgctcatgatgttttcctttttgcttgcttcgtttcgatgaagtaataatagcaaaagcccacgcggggcttttaacaaaaagtgctatttacaccaggcggaaccgaacttcatcaccgtaaatcacggcctgaatgtgatcgccaaatgtgacggtcgcgcgagtggtttcgtactccgtgtggccgtatcgccatatccctcgctggggataatgcgccgcgctttcgtgccaaatgttcatagtgaactcgtcagactccccgaactccaggcactggccgaccatcgctttgatggcctggtagtcatgccagcgttgagtagcacgatctgtaacgcgctccacatgcttgcgctctttgtgctccgccgccgcctcaaccacggcccacttactacgggtaaagattctcattgctggaactcctttttgatttgggcgcggaaccgcgaagcatctttttctgcccgttcagcgctgtgatatcgtttaagaaacagggtatcaatccccatgcaaagcgtttcgtcggcgctgtatttccccacaagccaaagactgaccgtctgcctgtccaggccgtagttcttatcgaagtgaacgcgcacattcacagggacgtagccatgcgtcgaaatgaaggcatcaacgcgatcgaatagctcttgcttgttcatgattattcctcaacggtgaatttaatcggctctttcccggtcgccttgcgatgggagttgaccagcgtttcgaacttgccgatgcactcgcgcaaatcagtgaacgtgctggcgctccccatgacacgccatgattcgacattctgcccgcgaacatagttgatgacgtgcttcatgattttgtactggtcgccatcctttttggtgtacacgtgcagcactgcgatcctggttgatttgtaggcgaatgctttggtgatgtatttgcaagtttgcatcgtgttcgctcctgactggttgatgtgatgactatacccgatcccaccagccagattttgattatttgtgctattcctccaattgtcgattattccatccattaggaatagtggaataggctgtgattgcatctgattccatggtgattacttttgacgattcatgattgattgtgattgtttcattctgtgcaacgtgatgatggagtgtttcatgatgtgcaacgaattgcatagatgcatgcactatgcacataattcgccgttcgaatcctgccaaaacgtgccttgtgtttcccaaacatttacgtcgtgtgggaatgtgggggagggaaaatcttacctgaaaattgcacaaaaagtgaccaatataagcctataatagatatataagtatatgataaataacaatattattattattactctatctatctatatgtgtttggtaagatttctcccggcatagctaccggaatcatcttgcgagagccataaattttagatgttccgccgccgcctggtggtataggtatatatacgggatgcttactaatcttacccaacacgcccaaaccctttgacagcaaggcttgcgtagggtaatctccccttaccaaacgcttacaaacgccgcaaatgtgggggagaaacatgcaatacaaaggttatgagttcgaagaagtcgacgtgtcagagtggatgcaatacgacgcagaaaagcaggccgcgtaccatgaatggctgcaatcgatcacgttcggggagcaggagggcaatcaccaggctggccgggccaacgaaggcacgttcaaaggcaaccgctcgaaggagatccggcgcatgttcctggatggcgggcgacgtatccagatgacagcagatcagttcacggaaaaattcggcgtgcatcccgtcgataaccacttccgccgacccctgctaaaactccttgagcctggcgaggtcttgcgcgtgagcctgggggccgggttaatcatcgtgtccactgagttcgatgatagcgcgggtcgtgacctggaggccgatgcttacaggcagcagggcgttcactctgaacgggaaagggttttatcgatcgttgacgaagtgatgccaaagggcttgctgtacaacggatacacgatggcactgaaagccagaatcaaaggggaaaaggtatgaaactctatcaagaccagcacgacccggcagcgccaatgcgcctgggaagcgagccagtaagcgagcaggacgttatcgacgcagtaatcaatgcatcacaggcagaaaatatgagcgccttagaatgcgttacaggtgactttcttttgatgtcatttcttccagattctgagtcatacatccagcacgttaccgaaacgggccaggcagtgacgcgaccggagttcatcggagcgcctaacgtgcttcagatgatgcttgacagcgccgacaatatcgttagcctggactatccgcaatagcactttttggtaaaacccggtcagagggatcgggtattatcaccacatcaccaacgagaggagcataaaccatgccacgctttaacagaacgcttcaactccgcacattcgccggataccagatcccgaaggagtcgacgaaggcagtgccgggacgtgaattcggcgtgtacttccactggcggggccactggcgctttaccgtcattcgcggcttttacgtcacctgcgacggcgttgacattgacgaccacagcggcggaaaccaggttcacaacttcaaatagcactttttgttaaaacacgatcggggtggcttgctatagtaaccccatcgaaactaacaacggagcaccacaatgaaatctcgcgaatacctcaacacccttaatggcctgatttactggctggaagatgacgcagtgatgatgcgcaaggatggcgtaaacatcgcccgtcaatccaatatgacggctgaaaccttcttcgagatggtatgcaacgatatgatgaaactgatcgaagtggagccggagcaaaagagcatgaccatgaacgaattctctaacttcctggctggcatcgacaagagcaccacaactgcaaccgcacaggtcgccatccatggcggggccacccacattgccatcgacggtaacggcgacgtcttcgcattcaagatgcgcccgcgccactgcctgccgaaagatgatgatgcaaaggattatctgggcgaatggcttcgagggtcggagcagtacggccacattgcgcgaacagtctgcttcctgggtaacactggccgcgagcatcgcaactggcgggaactctgcttccagatcccacagcaatagcactttttgttaaaacgaaatcggggtgatgagctatcattaccccatcgaaacagaggagcataaacatgatcggcaaccaaaacaacgcactcaatgcagcatttcaccgtcgcgcggtagagcaacacttccacgcgctgaaggtggtgtgcaacgagatgaatcttatgcttgacctgccgtcatgggatgctcaactggaagattactatgatggcctgcgcgctaaacgggatggcatcattaaccgcctgcgcctggctggtatgtttctataaaggagaaatgcaatgaaaacattaagcgctttactaatggctgtatacggtgccgctgtcatcggctggattatgaacattgtagccgcattcggtgcgcatggtgacgaattgatgatccgcattatcgggatctttgttgcgcccgctggtgcttttatgggctggttcatgtaaggagcaatgacaatgcaacaattcgaatctcgcggcaagacctacaacctgccggacaccgctacccacgccgcacctggtgcatgcgtcggcctgtactttaaggatggcgatagctggtacttcatgggtgatgtgattggggacgtaccgccgaagaaatgcggcgtgctcctgggtttctacgatcacgacgtggtggagttgaagccaaagcgcgtaccgttcgccttctggaataaaatcaaaggggcgctgttcaaatgagcgacccgaaactgcaaacggtatgctaccgcgattcggatggcgatgaattggtcgtgtcgccgttcagtggtggcgctgctggcgtagagcttatggcgacccacgatagcggctgctgcgtatttgacgacccgaaggtaatccgcgatctggctaatcagttgctggccgtcgccgatgccgtcgagaacgcacaaggagcggaagaatgaaccagttcgaatatatgcatcgcgcacataaagcgcttgccatgttcgcctttcacctggatatgaaagttgtatccgtgaccattgaggccgggagcattgagatctgcggattcgttggcgattactcatgcaccagaacctacacgttctcctctctcgcttccctggagagtcaggcttatggattctaaatgcaaattcaggattgtgcgcgtggcgacgtttgacgccttcgggcgtccggtggagtggtatgcagcacagcggcgtgttgccttcttctggtgggtgacggtcgagcacttcggccagttgacgcaggcccgctactggctccacaaatccggcgcaccgcaccgcccggaacgggtaatcaaggtggttgaatagcacgaattgctaaaactcgatcggggtaggctggtatagttaccccataccaacaaacgaggctaccaccatgaaattacgttgcaccgattccaacactatcaactacacccctggctttgagtacagcgcggagctgggcgttaccgtccgcacccctcatggctcgatcggctgtgatgtggttcatggtaacaacacctggttctttttcaacaaatcaaccctcaacgccgaacgccgtaacggttcggtcgtggcaacctttaaggtaatcgaatgatgaccaacgaaatcaaatccggcggcaaggtcgttgccaccatcacgcagcgccaggccatcgcgtttcagttgcatatcccaggcgctgaagaacccatctacgtaccagcctgggccaacacggttgccattgatgaagatggcgcgatttgggcttatgagtcggtggccgaagatgtgcgcattgtctgcgaggagcataaggcctggagcgattggggtaaggtcgaagcgaacatgcaggaaatcggagaaatgccctgcgtccctgactggacagaggcgaaaatcgatcttcgcgccatgaaatagcactttttggtaaacgcccggtcaacggatcgggcataattatcccacaccaacaacggagatttaccatgaaacactttatcaaaaacgcagttgtcgccatcgtcggaaccaacttcgacggcaagaaaagccgcattcaccttttgcacgtaggcaatgacggcaaaatgcgcggggcgttctactacggtgagcgcggcgagatcctgtacgactctaaattcctttcccgccttgtgcgcttccagcctggcaaggagttcatggagtggtcgccggaatacctctgcgaaggtctggtggtcgaatcgttcgttgccgatccggttaagctgacctcgcgcgactataagcgcatggcccgcaaggctcacaaactcatgaagcgcacgccagaaaatcacgtttggcatattttcgccaaccaactgtaaggccaggcatgatggaaacagtaacagtgatttgcacccatgcgagttatgggccacttatcccgctattcacagtcggaaaggagtatcaagcaaggttcggccccggcctggatgaagtctggattttgcaggacgacaagaaaacaacggagttgggcgaaaactggttagcgtgccgcatgccggatgagaagatcgctatgtttcttaaccgaccatatgaaaacaacgttttatttgaggtgaaactatgagcaagaaaatgattgcgctgtattgggttcttttcctgggtggtctggtggtcgccaaagaagatggctggcaaatgatcggaatgatgatggttatcattggggtaagccgcctctctgagattaacggcttccgccgcggtcgccgggccgcattcactggcgacaaagaatagcactttttgttaaacctgccgtaacgtcatttggtaaagtggcgttactgaagcgaaacaaaccaatcaggagttacaccatgaatgaccacatcatcgacctgttaagcatgctggctgaggataccgtagccatcatcgagcttgaggacggcaccgaacttcagatcgaggttcccagcgtgcgattctgcgtatccggcggcgagcattccgagcgctcaaccgaaacggatcttgactacgcgacccacttactctgcctgaacgcgatcgaggagatccgctaatgaacacaatcaaactgaaatgcgtgtccgtcgagtcgctcgttagcatttcctgtaagcctggcgatatcatcaccgccagccgtgataacgattcctcatgctggcacttcgacggatactacctggatgatgatctggtggttcgcggcatcttcggtgagttcgcacggttcgaagtggcgaagcgcaagaccgatcgcaaactggtggttcgcgcaatgtgcatcatcgcccgccagtatgggtggactgacgcaggcgtgaagcgcgtcggcaactacaaaacggtcaaggagtgggcgcgggattgggccgctttctacaccgacgaaaaaggcgagcttcagcacgatatcagcgactacctggaagattgcagccgtggcgatgccgtccgcgagttcatgcaggcagaaatcgacgccctatagcacgaattgctaaaaccgccgtccggggatggtgcatactatccccacacaaaccaaagaggaaaaatcatgagcacctacaaattcattctgaccccgaacgctgattctcctgctggcgtgggcgcgaaattcaccaaaggcaagagctatgaggccgagcctttcaccaaatacaccggggattcactgtataaaatcactgacgacgaaggcaacatgtacgcggtcaacccgcgcaactcgcactacatcggcggcggtcagttcaacattgagttgcaaatcaacaactgtttcgctggcggcgaactctccttcggcgggttagttagcgacgcgctgaaataccccctccacacttcggcgtcaatgttcggcggcgttacctccactgagtcgcccttgttctttgccgacctgaaggcccacgaacgcgataaagatcgcgatctcgaatcaatggtcgaccgcatgctgaacatgttcgggcgggatgagtcgcgtggcgttgtgcgtggatttaagatcggcgctgaaaaatccgcgcacttcaaagagggcgtgaaatcggcaagcgatgcagttgcagccctgggcatgctgtcacggtcgatgatcgtgaaaccggaaggcgagaaagaagcctcgctcgctgaccgggttaaagagcttgagtcagagcttaacgccgcccacaacacgatcgagaaaatccgcgaagccatgcgcacgccggaaggtgaagacgcgcagacccatgcgaaagttctccgccagatggccgacgccctggttagtttgtggcgcgacggcaaatagcactttttgctaaaacttccgcaaggccatttgatatagtggccttattgaagcgaaccaatcaggagctaaacaaatgagcattccgtatcctaccaaagacaaatcattcctgggcctggccgttgttgagattgtcaacccggacgtgaccaactccccggatgagcctacccttgcacagtgggccggattcaaagcaggtgatcgactgaccgtcgaatgctatagcgacggcgagaagtgggcgcaggtggggcgctattaccacaccgaagaatttggccaggtgctccctaccgactggttcgaacttaacgaaggcgaatataaggtgatcgaagaatgaacaacaaaatttgggtgctgacctacactatcgggactaacgaggggcgcaaatcgcgccgcctcacctgcgacacgaaagcgcaggcggaaatgcagcagcgcgtgctgggcggcgaggtggtcgaatacatccgccagccggaatccttccaggtcaattggcctgagaagatggacgttgacgccgtgctgcatgaaatgcgccaggtgcaaaacgacccggcggcgtggaaagacctgtatctttgcggcgacgctgagtcagtccgtgatcccttccgctttgttcggcaggcgcacgcggaatggtcagatcgccagttcggcaacgttggcccggtcggcccgctgaaacacctggctaaagaggccaacgaagccgccgaagcgccggatgacattagcgagttcgccgatatcatcatgctggtgtgggacgcaaccagacgcgccggaatcaccgatgagcagttggcagtggcggtggcggaaaagctggagcggaacaagcgtcgccagtggggaatagtaaaagatggcgagccatgccaccacttgaaaaattaacgaattcgtataccatttaaagcgcctgtaagcgattctggcgggcgcaaattttactaaggtgattctatgtctgaatactcaagagttgaaaacgtgcctattggcgcagcgataactggtatccaaatgagcgagtcggatgataagattactccactggctttcccggttacacaggtcgaaaccgacagcaagaaaggtttcatcttcatctacaaaaatttcaacgcccctctgcgtgtcgagatcttcattgctcgcggaacctgggtcgaatgggagaaggcttaaatgttcggactgaatgaggcgcagtacaacgctgtgaaacgcgtggcgaaacgaatgacggcggaaactaaagacgccatacggaaagacaaaaagacttacgatcaggttgcagcccggatgatcgataagcattgggccgaagtcaacacgctgttaactcgcggtcagtttatctggctggctggctatctcgaaggccgtttcggtcgccgtgatggcgagtatgagtaaaaattaagcgaacgaatcaaccgcctattgacgcattcacgctgaccgggtatcgttaaaagcgtagacacaagaggcggtaaacatccgcaagtctcgccccacttcggggcatttattggggggtgatgatgcagtacaaggtcatactcacagcaaggaaaatgggcggcttttgcaagtcctgcattcaagagttcagtatgacgattgaagcgaacgataccgccgacgcggtggagaaagcaaagcagcgttcaggcgtcaacctggacactcataaaataagcatcaactacgtaagggaagcaacacaatgataactctgattgtcgcgttaattatgctggtcataggcttctatgcaggcactttccaccttgtcgaacggctgtccaaacgcgtgcatgaaggcactttcgccgcgatgctgtacaacaagaaaacgaaacgctgggaaaaaattggcgatccgggcggtatcgcgaaacgaatagagttttcgacgctcccgtatgttgactgtgagccttttgcatcacttcagaaaacactgaagcggcgtaacaaactgatatgaacataacccgcttcggcgggtttttttgtgcctgcaatctggtatactcgcaactcaacacagaaggaggattaaca

SEQ ID NO: 47 - DNA, 176860 bp, unidentified
  source 1..176860: mol_type = genomic DNA
ttagtaatggctaaaaccatatgtaacatcaatcatgactttataacggcatacacgcatttttgcgttattgtaatccactgggatcgctaccacgtcagcaggatccacctttacctgaatgactctaccaacaccgcccccgtagtgtggaaggtatgatttagccgcaacgtgtaggccagtagaacaggtgcgcgttttatcttcgtctaccatgtttcgaggcatggagacagtcacaccaggactattatcaaatttgccagtagcgagatctttatagttatcgcgcacacgtttccaggcaaggaaacaaccatcatcggtcagttcaatgtcattatgtacaaggaacccataaagctggtatacagcatcgcgtgaagggtttcgcatcaaccgttcaaagaagttcaccagatgttcatacggacgatcgttatacatttcgcgaatgattcgttgagtgatatcagaatcaaacactacatctttatatagaagctgatgaccaatgattttaatgttgcctttgctataggttcggatcgcttcttgagtatccaaacaagttacagcacctttgacatcaccagctttcagcatttcatgcgctttcttaaagttcggatgtgtttcacccgccatgaaaacgcgcccttcgtatacaaccgtaatgaacgattcagatccgatcatacgcggtacagtgtctgatactttaggcgtttgttttacatcccttttcttagggaattccgctaacttgcggttgataacgcgcccaatggttcgggcgcttacgttgaactgttgggctagtgctgttttacttgcccccgtcaaccatccattatagatagctttctgttgtacttcgtcgagaattttgaccattatttccaccgtattaatttcttaaactcactgagattcttttcgttgttgtaaatcggacgaattgaataagaatcgctatgttcaacaagtgaagccagtaacgggtttagtgatttaaagatttcccatgcctgatcaacacgttttttcatattgctgcgtttaacgcgcattgatgctacggattcacgcagaatcggacaacgcaccctggaaagatttttaccatctttctcatacccttccagacacactatacgttcgagggtatcaacaatcttatacagtttttcattatatcggtttttcacaatccgatcaagcgatacaccgaaacggctatgcaatgcgtctgtttctgttgagtgatccttcccaatccatccaggcaagcaattatctttcaatgccttttcagatttaacatactgcttgcacagcatatcatcaaagcataccagatttgaatccgggatccacttccagaggctgttacgtatagcaaacacaacagggatcccagtatggcgcatgatacgcgataaagtagattctttcattgctgaatccatagacaacccggaattttcaccatctaagcggctatattcatcaataccatacaaccgaacacctggggctttatccagtgataaaaactctgattttgtcataaacagagaagtttttgccagattgccgttactatccaactcataacgatatacggtcggggtttttgggcgcggttctgaatttttcggtgcatatagcgcttttgatttttcgcgatctgcatcatagatctctttttcttttgtcatttcactggtacggagatacacaatttccgattcatcaaaatgacctttccgaacgatatcattaacaatctcacgctttgaatcactatcgtaatatgcaacaaagctaacacggcttaggttatgcattttagcatacccgacgatatacggtttaaccgtgttggtatccacttttaacagaatgagtttcttctgtttccacggataataaatgcgtgtgatgtcctggcgtttggttgtttctggcttatacttgctccagcggcctccgctaccagttacctgataccatgcatctttaccgtcgtattcgttcgcccaatacccagcaacataatcatcattatatttgtttggtttgactagttcgctatggatccagccaatagaatcaccattgatgcgaaaattagcatctttaccaacaaagttttgtaccattgaaggcagagaatggaaccacgtcagtttatcacgcacggtttgtaacttatcgaattctgatttaactcgattgaaatatacccggctgatttgtttcagacgttctttaacaatccctactgtcattttatccatactcaactcttcgcgagaaggcatgaaatcaagttcaccgatcgggaagtcaataatatacgtatactggctttctgtatagcaatagaacatcgaggtatcatacaaatctttatccagaggataaatgatgttacccatgcgagcatatacaccgctagtgtatgctgatttatgacggatcaccccgctatcgttggttgcttctttcggctgatagttgattttgagaatagaagcaccaacaaagttaggacgaatatcagtaaatgattcgtatacccttgctgcttcgttttcccattctttgatatcttcaaccttaacaggaacagtgatagtaaccccgttaggttcatcgctttcaatctcatacagaggatcgcagaaaggttccccatcatccatatagattgtgtaaccgcatttgataccgtcttttacggattccaccgtgaaagcatcggaatagcaaagcggagatttgcaacccagccccatagaaccgatcaggtcgtttgaatcatttttagttgattcgaagtaaacggtaaacgcatcactaacgaaatccggagacataccgatcccgtagtcacgaataacaaaacgaggatcaacagcagttggcaactggacatcaaacgggttctgatttcccgcttctttgtgtccatcgatcgcattacaagacagttcgcgaatgattgcgcggatcttgtatttgtatactgtcgaagaaaggatcttatacgctttcttgtttgcgcgtagagatagtttgtttcgtcccttgctggtatctgtaccaacacgatagatggtttgcggtgtatcttcgcgtaatttcattgtttatttctcacttaatattaaaaatgacttgatcacaagagtacttcgttggctttttgttcagaccatattccaccacttcgcaataagtgtcaaggaattttatcaatttttcttcgtcctctttttcctttttcatatcacggatacccatcacaatagcaatgatgatagaacagaagaatacacagatcccaaatatggtcagatattttcctaattttggtgaattataacgtgtcataccttacccctctttgcgaatatatgcaagttcttcatgggttactggacggatatacagacggccttttgtgtatgccttgcgcccactgatccaaatgtttttcatatccttaacaccgttcatcacatcgttgtaaaacttcttatcagctttagcctgatagacttcacggccttgataatctttcatgaacaaacagtaaaggatctcattcttatcaaccagattagcatcctttgtagttgttttactcggtgaaggtttagcacccagtcgcaaggccatagcttgccacactttaccatgttcataaccgcgcccgacaagagcatgagcgatttcatgtaaaagagtgtctaaaatatcctcgtagatatcttccgcaacatgacgaccagatagttcgatcagttttttggtataactgcaacggcccagagtttttgtaatgcgtccattgatccggaatgtccaaccattactgatcaaaccgtgtttttccatcatggtacgcgcccagtgggttacttccattgcactacgagttttcaacattttagaatctcctttgcttggtacaaaaccaatatagcaaaaagccccctgcattgcaagaggctttgtaattatttcaatttcttagaaagttcttttaaatcattgagatactcaattttaggggttgtttcttcccagtatttcaactgtttacgcaattcttcggcttcgtcttccagctttttgctttcgtccgtggttagatggtagatgttcatagccactaacatttcggcatgattctcgcaacctatccacgtagacacaaatttaaccgcttcgctgcgactaagaccacgtagagaatcaggagattctaccatttgagcaataaacgcaacctttgccagtgctttatctaacgcttccttagtttcctggatacgcttattgatacgctgttgatatacattcatacgaatatcaacgaaatcctttagaagcgtttcagggcgttcgtatgagtatagtttgccctcaaagataacgttaatgtttgggtttgaattttcaatcaacccgaaatcttttaggatcttttcgcgggttaacccgttggcatactctcgcttgagcgttacttcataacgaaaatcttctttcgatagatccttgtagctaacgataacgcctttttcttccagcttgtcaaggattgcaatgtatttcacacggtcatatttcactgggatctcggtgatcaccaatttggttttaccttgcaattcatacgtgccgtaaattgtaccgtctgtgatttcacctttaaagtaagggtatttcagatccagtgtgaaatctttatcattcagatatgcaatgcacccgttaacaaccgatttaggatcatgaggcggaatgtttgttgcatatgcttttgcaatcccgctaaacccgttaaccagtaccatcgggatgatcgggagatagtacgctggcggtacatgttccggatcttcatgaactggcgttaaatcaccatccatataaattgctttgaatattggcgatagtttgcacttgatgtaacgaggtgcgccaggtttcttaaccaaacgggaaccaaagaacccatcacggtcgaataacggaatgttattgcaccagtgcgccgccataagggataacgcttcttctacagaggtttccccgtggtgatacccatacatagcaacaccgccagcgatagaagctactttctgaaatcccgttccgccctgcatcgcagagtgaataaagaaacggtgaacgggtttaaacccgtctaccaggtgcgggatcgcacgtgaataaatcgtgtaaagggcaaacgttagcccttccacctgtacaacatctttaatacttctttccattagtcaaccttagaaaatttgtgttttccattaacccaatctttacgcggatcagattcgtcgccgaagcatagttctaacacttctttgtattcgtcgtcaagtacaatgacatcatacttcaactgatcacccagaacacggtcgtaatcttctttgcgtaaagaacccagccccttgatatatcgtacatcttttgctttatcgcggaacggcgcaaactcatcaagagaatagaaccatttttcctcgcgcccaactttagcgataacgatcggggttcgaatatatcggatccgtttctcagtgaacaaagaaggccaacggctaaagaatgcaagcaacagagttaaaatgtcgccgccgtcaacgtcagcatcgaccatgatgccgatattatcataagtcattccggaagtatcaccaggatgaatattgaggatagccattagctcaaacagttctttgtttttgataatgtctgtaaaactcataccccatgtattcagaggcttaccacgtagcgggaaagcgccttgtgtttcttcattacggcattcgatgaactgaccaacagcggaatcaccttctgtcagaaacaatgttgtttctaccccaggggtatcaataccggaagccggaacgtgtttagcaatttttgcctttttcgctttctttttcgctttggtgatcgcggcggcttctgctgcttgtttacgaatcaatgcggattcaatgatcggagtaatgatttctggggtatccataatcatttttgcgatctttttgtagttcaaattcgcatgattgttaaactcacctgctgtatttgctaatcgctcttttgtttggctatcgaatgcaggtgcattaaagttatgcaggaataccacaagagttaagcattcttttacacgtgctttcgggatctcgatactatgctttttcttgatcatcggttcaagttcagaatagataccatcaatcatacactcaacatgaacaccgccgtttttcgtatccagaccgttaacaaaggatttctgtttaaacccgtcctcagtgctcgccagaatgaagctgaggcgattatttgtctggacaatggttttatccccatacatggaagcgtacagcgggaagcgattagagagcgtttcgccgttatatgtgaatttcacagacgggaaagcaacggcaagggccattaagcgatccttaatcacttctttggtttcttcatcgataccagttacaccaaacatagagaagtctggagtaaacttaacagtagtaccctgttctttactggggctggttcggtaatcgatgttctgtgcgccgtccgtacagttaatggttactttgcgtttcccgtttgcagtctcgccaataaaaatcgagctataacagtttgtcaggaaagaaccaacaccattcatacccaacgttacgcggtttttatcatcgaagttagaacccgattttgccatagtccatgccgcaactggtttaggaactattttcccatctggggtttttacatcatcctggggaataccgcgcccgttatcagagattttaaccagattatgatcaatggttacatcaatcttattagcatgtttgaattcagttcggatcgcttcatcaatcgagttatcaaggatttcgttgatgattttaaccaacccttccacgtactcaaccttgcgatattggcccattatgaaacgttcatgcgcttctttgttaaccgatccgacgtacatatttggacgcaaccgaatatgatcgcgatcgctcatacaaaatgattcgtcaacctttgcgccttttttggctggttgtggtttctgttctggttcatcatctgccagaagaaaatctaaactcatattcacctctttgtttaatcactgacattatatagggttctatgaaaaagaaaacccctttcggggtttacttgttataagggaaaccatcacgaaccatttgaggtttatcaaccgttcgttttgcttcgcctccgcaatcacaatctttaggtgcatcacgggtagcaatgcttgccatttttggaaattctttattacacttggtgcatttataggtataggtaggcattaatagatctcttttaaacttaacatcttaactaaacgggctttgtctatgtcaaaaacacattgacgtgcgcccggatacaacttttcaacttcgtataccatgcagacgaaaccaacattgtgcatgtactcgcgttcatatgcattgaaccaacgagaaaggcgctgtattgactgaaaaccaaagtataacccagcctcttgaaagtctatattatctttttcaaggttgcgcatcaatcgattatcgtcatccggtgctggatgtcggttatcatccatatcaatatagatatcaggattcatacagaattgatccagccattcagcggtatccattgacacataacgattgacatatgggccgctttttgtttgccatttttctgtacaatcattccagaaagaacaagaaaattccacacgatatacgaacatgatataatcctcacaagtaaactcaaggtttacaagtacgataccacttatctaatttttctgcaagcatttcgttgataatttttgcaatttcgtaccgtccgtgagtagtacccagttccaggtaaatcacatcaagtgcgcacacaatcgcatcaatactttcttcaacgatattaccgccgcgttgaggctgaatgagacattcgctgatctcgccaacttccgctgataggtgatgaaccacatcactcttcgtgcgtttcttcactttatgagcgatttcaaaaaacttatcaagtacgatcgccgtttcttctcgcgttgcagtattctcggatgtcgtctccgtttgttgaacaacgtattttgtaaaatagttttcaaacacgttgaaagggatcacatgaggaacaccattcaaaaacaccccttctttacaaacataatggatttggcgcggaatagacaacccgccgctgcgttccaaatgtcgtttaacgcttgctacaaaatcgaactctttcccgtatccagccaacatactgtgatacgtgagtaggccaaatgcaggaacatagagatcattttctttatacagattcatttacaatacctttatggtagccaaaaatataacaatcaattgaaggacgttcaccagggaagtgaatgcattgcatgatgcgttcagccattagatcttctcccatgtataccgaagtagtttcttcgttgtaatgggtatcatacgacgttttaagcgtcatgcccggaagccctgcaatgtgcatgaatttagaattggtgcaaggttttcctacttcaccgttaatcatcaacactgcattagttttacgtgcttttctcatttgaatttcaccccgatttgcgatacgttccattcttttacttcatcaacaatatcataatggttgatgtatggtaaagcaatttttaaattactcgcgtcttgaatgttgcgtaagaaacgagtaggagaaagaagacacaaccgctcggatccgttgtttcctttagcggcaaatgatagggtttctcccccgtcaatcttcatatcaacagaaatcgttttgaattctggtgcatatgacgtgattttgccgttgtctctcggtgtactatagaaacatacactttgtgggacattataacggtctgtttcaatgtacatgtaatcgccgtcagccattccccacgcggtataaagggatccggtatagtcaccaaaggaatttttaaaatcttccttcgtggtgtatcccagcgagcgcaattgcataagctggttatgctgttcgattgcgtcggctttttgttgttcctgtacttgcgcatcaatcgtttcttgccaggaattatacgcatagtaacccacaacagcgattacagccataacccctacagctttccagattttagcgtcttcgtttttgttactcatgctatattccttttaagaaaaagggccgaagcccctttgttaacgaagataaaccacataaccgctttggtcaatcgcgcggtctgcgtcattgaagatattaccacgaatgccttttgctggtgctttccagcttgcaggtttcaggatattaccatcattatcgatgaaggcggcaacagaacgctgattgaacatttcaccagtttctttgttgcgagtatcctgaacaacgcgatgatatttgcggcctttctccagaaagaaaacagtttcgaaaggagaatcttggaaacgagcgttacgcgctttgtacattgcttccatgaaaggggctgctttttctgcgaggatttcgaaagtgttcatggtatatctcctaaagtgtgtttcgtttcgatgtaagtactatatcaaagatggttattctatgcaaggcttttttcgttatccatcaaatattttaagtgttcttttaatgcagggagttcgttcaaatggcgttgcttaactttctcgtactctttgcgttcccagttttcaagattgcttgccaacgcttcatcacaataagcgatcccgcgttctgcatcctgaactttctgtttccattgtgcaactgcttgttgataaagagaaccgttaaccatcataataatttcctcccttgtttcgatggggtaactataccaaagctaccccagaatgttttaacaaaaagtgctattagtaggtatccagtttatacattttgcaccagttcatgaattcttcgaaagtctgagtattaacacgtttttccttcttcactttcttagtgattacaggacggttagtaaaacgtttttgcattttcacagtgattgctactttatcgcccaggtcttctaccttttcaaccagcgcccactgagaaccaatttcagcaccgaaagttaaaccaacaatctcacctgctttaacgtgtgctgcatattttactttaaccattttcgtattcctttctctgtttcgtttcgatgaatacaagataccaaaaagcctcccgcaatgcaagaggctttttaacaaaaagtgctattttatttctttgagcaatttacggatcccaccgccctgtgtcttatcaaagattttctttgcatcaataacagaagtgattatgtggtagttgttcccttttccgtcaaactcaaactcgaccttgtagtcactacgaaatttcacaaaaacaaattcacctgcaaagtgcttacagaactgtttttcgttaatgtccaaccattcctgtgtatcatctaactgatacatgcgacaaaacaggatcgaacccattacaacaatcacgacaaggatagctaacgcaaattctgacatcatttacccctgtttactgattgacggtgtaacgatttaggcacaaccggatttcgatacggtttgactttatggatcatgggttcttcctcaaccaaattaggaaattggttgttccattccatcgaaaaaggataaggttgtgactttaactcttcgatcatacagtttactaaacggtcgccgattacacccaaagccgccccaataatcgctatacgcataaatcaccccttaattgtgtcaagtacagtaaaccagtcatgaagccatatcgttgttcttacagcgatatacgttaacaaactaatcaatgataccgctccgcaaatagccagcgtaatcaacagccggatttcaaatttagtaaaattcatatcaatctcctttctgagaacccaatataacaaaagccctcaaccgaagtcaagggctttgttttaaatttttaccagttttggcaatcgaagaactataccaggatggatcagacgtgcatccggaatagaatcacggttgattttagcgatatcaggccaaagttcaccaacaccatacagtttctttgctatagaatataggctatcacctggttgcacgacatagcgatcagattcaatcttaaccagatcctggttaatgatatcatcaaaggcttttgctttcgcttcgttaatcgtgttcccgtagtaatggcgatccataatagttaatgtgatcatcgtttctttcctatgctgttttcgtctgtctcttctaaggatggaggttcttccagccccagggcataacgtttagcatagattaacatcaatgcatctttagcgcaatcatgaatcgaatcatgctgaatgaatccatctaacatgcctttacgtagtggacacgtggtcactccgcgagtcagtaaacggttttcaatagctgtacgcacatcacggctattccagaacacggtcggcatatcttcaaacgtgtcaagtttccctgtcatagttcgtacaacatcggttagcatagaacgatcgaattcggggccgcgtgtataatcgtatgactgccaacgactcacaccgtcagccgctaaatcagcaaagaattgtcgatgaccttcgtacaaatccatgtcaatatcggaagggaacaaaaccctttgcgcttctttagattgctgtttccaccattcgatcgttttttcatctttgatgcgttctggttgtttccggatgtcaaatttgtactttcttcctttagcaatcagttcctgaaaggtaggcggatcataaggatcatcaacaaacggaacatagctaagttcagctagttttccttttggaaacgggccaatactttcataatcaaatacaaaatctacgggtaaatgactcattcgcgaccccgcttatacgattccatgaaataggccaatgatagcgcgacttccggagtaacatcaacggatttgatcatgtctggagttactgccatcatcccgaactgacgaagcccacaacgagcaatcgatttttccagtcggatcatgttttctacagcctctgcaaaattgtccagatgttcccaatcgtggtaatcttccattgtagaacgatcacttttcaaaatcagatcggcaacggattcagcataaaggcgcggaaggtgaatattcatttaaaacccctcaagcatgtttttgttttcacgaatgttacgacccattttcaaagtatcaatgatcactgcatactcttcaaaagtgaattcgatatcttgtgaaatgtttccccacgtgtaggtcggcccgttaggacagtataacccaacttctttgtttgcgttgacaatgcagcgcaattttgcaaacaacaaattgatatcgatagaattgaacccttcgagataatcaagcccctctctaccaatacggtcaacttctcgcaaaatcttttctacatctttgactttaacaataattttcataataacctcaaagggccgaagcccttagacataatcaacagtgaatcgtgcgcgggtagttcctacataaagcaactgcttacacaattcataatcggcgtatgcgtatgcatcgcgcgtatacatgtatgaatgatcatacgtgcttccctgacctttgtgatacgtacaaaccggaagcgccttaaccgtctggaacttgtttttgatttgccagaacgaataccagggggctttgtatccggtttcctgtttcatctttttatactgaaacgcgacgtagttcaaataatcgcctaaacgttcctgcataaccggatccgcgataacctgaatatccgctttcgtatcctcgaacatcgattctgttttcatcaagaaataatcgatttgtaccggatcacatcggtcagctttgatagtatcagaacgcgggatgatttcaaggattttaatttgctcgttgttgttatagataacttcaacaaacgaaaccccattcacacggccttctgtcactaacggttcttgcatcacaaccacttcaccaacaatgaacggctgatcagttttgtacaagtgtttgcggatcactgcatttaacttgtctacgtttgcgttagtgtaagcaaacatacggttattgttcaggtcatccggagtcttaacacggctaaaataacgtctcaggaagtcaccagcgttttcgtgcttcattacccctagttcaccattcatgaggggcattaacggcttaccgtcgcgtatagcgcgtgatacctggatgattgggtttccttctgcctgacgcataatcttatccatgcgaatgacatcaaaaatttcctcatcaaagaacggtgaaagctcggtgatcccttcggtattaaccggacggatctgatccttatcacccaatcccaggatcaccgcacaactcggaatagtacgcttgatgatacggaatagttctttgtcaaccatcgatacttcttcaaccacaaacacacgacattcagacagatcagcggcttttttgcctttttgctgttcaaatactcgtaactcttcgttggttacggggctgattttcagtgctgagtgaatggtcgttgcatccatacccaccgcctcagagagaacgtttttagcctggtgcgtcggtgctgtcaaccagatcccactaatacccagttttttcaatgtttcaaacacaaattttaccagagtagttttaccaacacccggcccacctgtgatagtagtatggattttgtttctgatatttttaatcactcgatcatgtgcatttttctggtcttcgctcagatcgtcaaaagttaattcgctcatactttaatcaataccccttgaatacttgcgtgttcaataaaccaacgcatatctttctttttcttttcggttacggtttcaacttcttcctttcgaaagaatcggctaagaccactttgtttaactggattcatcttatcatgatattctttgataatcgaatttttatactcgttagcatcgtccggagatagaaacaacaaaggtgttaactctccttccttaatgaagggaattttaaacccgtctttatccttactaacgacgatataatattttgtaatcattctcgcccctcataacaaacgtagaatattccaacaaaccaaaacactgatagtataatcagtaaaagttttctttcaacgccatttacgtgaaacacacaccaaccgaaaagatatgtgatcatcgcgcaaacaccataagaaagaaccccaacagctaatagcatcaaaaagtgccattgatcgatactataaatataataaaggagattatacatgatatcgaccgtaagcacaatagttgttcatgctcattatacaacaactcccgtatttgaaggagatatctacacgttcaaatacacttttcctatcgaacagatagttcaattaatgaaaaatagacatcctatcggatggattaccccagcaacaaaacatctactaaggaacaccatcgatggactaccgtaaaatttacaccaatcttatagaaaaagcaagagatagaacactaaattgttacacagaaaagcatcatatcatcccccgatgtatgggaggttgtgacgatcatgataatttagtagaacttaccgcagaagaacattatgtagcccatcaacttcttgtcaagatgtatccacacaataataagttgatatatgctgctaatatgatgtgcgtcaacgcaacacagagaaataataaagcatatggatggatccgcagaaagtggatatctcagatatcaaaagacaggacagggacaaaggcaacagaagaacaacgcaaaaagatgtcagaatcccataggggagacaaaaactctatgtatgggttacgcggtgataatcatcctgcttatggtcaaaaaccctggagaaatcaaataacaatgaaaggaaagcatgaatggaggtatgctgggattttctatgactggtatattaacgatattaaagctggaatctataaaagacaaggacacaagagaatgctacaagaattgcaaattgcaacaatctcccgtgttcctagaacatcaatcgagttattcaaaaaggggtggaacccttacgaagataccgattgggttgagtgggctaataatcaatagctgttggcccaacgacgaagattttcggcttgtttaagagcgtacatcttataaattgtttctgcatccatacccaatgcaataaacttacatagtacaaagtggaattggtcgatcatttcaaacagaacttctaaacgatcctcttcactcagatccgcaaatttagtattgcgcaattcctggtgatttgctttccacggtttccaaacaccggaagcaggtttaacaccgcgagacattccacccagagcggtatacaattcgcgggtttcatcggcgatcgcgtcgtcttgcagtttcagccaatcaaggatttctccacaagtttccagattatccggacgcggaacccaatgcagggtatcagacaggctttgttgtgcatggttttgtaaatccagcatggattgtaaaggatcgccattacgggccagaaccttttgatattcggaatctacaaattccagatcttccgggttaaccaggtgcgcacatgaattaaatacaggagttttatcagtagtcatatcaatctcattttttcggtgatttgtcccacgacttaaatcgaagttttgccgtgagtccagaaacagtattatctttcaaatactgcataatttcaagtttagttgcgccgtccgtttttatcatttcgttgatatctttggaaggccacgggcatttatcccacattacaaccttttctccagcctcaatcaatttaaagaggcggtgagtagtatccggatgacgtgcttcattgtcaagaacccagacacgcatatttttatacggaacctcagaaagtgcaagctgtccaccagtgatagcgccagcattatcaacaaacaggctatctaatggcccctcaagaagataaaccgtttttagcggatctatcgtatcctgtccgtaaatcttggttgattcttcacaggctttgattgtgatatatttcgactttgccccgtcgcgtaaagcacgaccctggaaagattcaattttccctttcttatcgaagatagggatcactaatctcggttctggttttgcgatcggataggtatccggattcaccgtattaaccagttgttgccattcgcgagtaaaccacaaccgatcccacttgtcacggggaatacaacgattctgcacatattttatgatcggatgttcatccggcaaggtatctaacctttcgcagaattgaagagtaggaataaatttcttctcttcctttggtggttctgtatgtgttggctttaacgaattgcgatccttaaacgattccatgagataatcacggtaatcgtctggataatattctttcaggaatacgctaaacggcacaccataaccacagttaaaacaaccacaattcatatgatcaccctttttagaagggtagatccaaaatcgttttttgtacttgtctttcattgagtcgccgcaaatagggcaacgcgcattgatgcttaatgcccctgatttacgaacgatttcgctttgaggcagtgatcccatgattcgggttgcaaattctatatcaagatacatttcttacctcagttgactatctttagatcctcgtcgattataccccgcgctgatcatttcgtcatgttctttttggcattcaatacaataacggcaacccttcacgatagccctacgtttttcgggtatcggatccccacaatcaaaacaatgcgttaatgattctccgtttctgatttgagaacgtgcaaaatctatcgcattgtctattgttgcctgaatggtatcttgaacaccgtcagcagggccaaatccaaccgccattgtaaatcctcctaatcaaatgatttcaatatcatagactaagaggatttttctgtcaagaacttacttgcttttctgttccgtcaagcattaacttccaaccacgaaacgcctgtttaaacgaataatttattgcaatatcaattttatcagaaccttttcgacgattctgataaacggtcgcgttgtcactcatatacatgatacaaattggaaaccatgtataatcgttagcagtagcccagatagtgatattcagcggaggaattatcatttctttttccttttccctgcacgggtaacgcctaatactttcggcccgatgttggttactgctccagtagtcacaccagaagcaatcttttctgtatcgccgccagaatcacccgcgaccatatcctctaacatgcgccccttatcataatattctttgaggcgtggaacattcaacatgatttcttcatgctcttgttctgtcagattgtagcgattgcgtagggtatcatatgaactggttaagttcataaacccactcatatacggaacagcattcattctacgcttgatatggcgtactgaacgatgaaaaggagaatacgcttctaactcttcttttgttttggggttgcgaattacttcgccttgtccatcaaggatccccagcttgtaagcagaccactctgtgaatggttttttcagtaaacgaatcattcgcacactgtatgttaaatccatattacgaatcatttgatcactcatgatgatctcctttctaaattagtattacgttttatttgttctgttacaactgcttggtgtgcttcttcgggagtaggaaataatcccaaatttatctttttcccttcaactgtgattctgcctctccataacacaccttttgttttcgtttcatgtttggatacaccgatgtaaccgctagagttagtagatggtgcttttctgtttatcgcattcagagattgtgttagttctcttaaattactgataccgtcaccaaattcaaccccacgcacatgatctactatttcaggtagatatccatgaacatagtaaaatattagtctatgtcttctgtactgttcattgttaaattttataacgtgatacccctttgcattggggctaccagcaacatcaccaggctttatctttcgttggttagagttaggagttttccatagcacaattcccttttccgtattaatagacagattagggattaacagatctaatcctttcttttcttcgtcaagggttcgttttccactaccgtaacttttttgcatgattattactctattgtgaaagtgaataaatcagatttggtttcaggttcaaactccatacaaacaacctcgcatagtggtttaacccctttccaatcctccaggtaatacccagtatctataccgcatccaggattcataacgaggccagtttcatcaagaaactttttgcatttacttgatgtggtgctgtcatcttgtcggaaacagtgtgttttcgaataccggaaatttgcagacatttgagggattatgaaagttccctgacgtgcgatctgtgatgcacgttcgattactttatactcaaattctgcccctgtatacttacccttaaaatcagaggttttgattttaccaaaaggcggattactgatcgccatatcaaacacctgattaaattcagttgttaaggcgtctccatgcacccaggaggcttctggtacgatacgcttacctaactcatagtatgtgtgatttaactcaacacagacgatttcacgcggcgtattgtacatcatgtaatgaaccatagcgaaagataacccaccgataccagcacacaggtcaataacacttccacctgtgcaagcatcgattgtgaaatcgcgagcaagtccaataggggtaaagaacgcccctaattcagaattgtttgtaaacgcgccttcatgaaagttttcgataatgaacaacttctcttcgtaagttagcgctttgtcagagtgaaccagatccattatctgattgtgtttcttggtttccgctttcgttaactttgccattttcccagctatacaataatgttgattcgttagggtagaattcccatccgtctacatatccggtttcccaatcagtagtttgttcaaaaccacagatccattcatatacaccaggaggcatttcgacggaatcaggaagcccgatatcttccgcgctgcgtccacattcaaagaatgcatcatgaatgaatggtcgagataataccgtaacataaccttcatcgtcaacagctacgatccagcgggaactatgaggactatcgaacttcggttcttcttcgtctgcgtcagcttttatttcagccttacaaaaatctaaattcatcatttcaaaccctctttaacaccctctttcatagctttccaggtagaacctgcttcaccattcagggcggcaaatacaaataataagatagcaaggacaagattcacgccagcaatcaccatgattttgctatacacgaaaatgtaaggcattgccaccacccaccaactaaaagaattaccagttacgatgttgagtgctgcaagtaagaaagtgataacgaatgcgattttcataatgtcctcctttgttatgattaaggtatcatcttttttgaaagaatgcaatacctatagatacaaaaaagccccgaaaggggcttaattttttatgcgttattgatgagataccgaagaacgtttttcgcttgttcctcattacaaccaactttgaaaccaggttcgatagggaggaagttccagaggaaatcaacacttccttcaacgtcatctttgcctttttccagcatcgctaacagcaaacctttgtttttgatgctgtttacgattgcgtcaaaataaccatcgctgaaatcaacattcgggttcagcatttcgttgtaagggttgttgaatacgttcattttgaatctcctttgtttaactcagtatcttgtctacgtgagttatattaccacaatggagattcaggtcaatacctttttacgattttttgaaaagtttttcgtatttggcttttacccagcgatacatatcttcggccttgtcactggcaagcagtgagaacagcagatagatcgcagcacccaccaacacaacgcctactacaatgtagacgggtaagagaactgggaagagaacccagaaccatgacatttgcgagaagccaaacactttagcggctgcaaaaatcagagttagtccagtcagcagtttgatagccggaataggaatcgttatagtcttagtcatttcattaccttacattctttatggggctattcgccccagtcaattaaaattgaatgtcagattttgcaatctgtgtcattttatcacgtcgggtagattcagcctgtttaatcatcgggccttgtgtctgttctactgttttaggcatagtgttgccgtggtagtcagatttaaacccgtattcgctgttgtcggtatccatccagcgctgattaccctttcgaacttccaacttgaacttgttgaaagtgttcttatcgccataacgggatttgatttgcttgaacagttgcataccctgatcagctaactcttccgtctcgattacagctaacataaaatcagccgtagcaggtaaaccagcggattccgcaacatcacccatactcacatccgaactatcccatgcagaacgcccaacctgtgcgcctgtccacattacggtattagtttcaacagcaagaccgcgtagttcttcggcaattgctttaaccagaatataggtattctcagcacctttaacacgggttgaagtacagatccccaggtaatcgacaatgatcacatccggaacaaactgtttcttcaatttaagctctttcacaagcgctctaaagtggtttgcacctgcacccgatgtagggtactgcttgaccaccaaacgcccaaccttacccgctttaaggcgctccattttgttcttatagtctgcgtatgtaatgttaccttcgtcgatgtcatccatagtcacatcaagaaggttagcatcgatacgcttagagcaaacatgctctgccatttccatagaaatgtaaagaacgtttttaccctgttgcagataatcagccgcaagagaacataaacccagtgatttaccaacgttaacaccagccatgatgatattcagtgtaccacgttccgcgccgcctttggtgattgcgttcaggatcgggataccaaacggaattttcatcgccttcgattggtaaagcatccaccgtttttcataatcttcgaaatagtcatgacctactgaactatcgaatgaaattgctaatgcttcctccatgatttcagggatagccccaacaccaggaagtttcttgttctgttctgccagtggtttttctgcgttagcctggatctcgattgcgcgagaaagagcacgatacattgctttgtctttgcaatatgtttccgtttccttcattagccaatctaaatcttctggcgcatttttcagcgactgaatcgcctttttcgtgtcttcgtagactacatcacttagatttcgtttgtcaagcgcaacctctaaagcagtttttgacggaataccgttgaattcctgtacatgtttatcaatgaggtcaaacaaaacttgtgcattgccttcaaaatattcctttttcagatgaggccatgcttggacaaaatacgtcccgttataaatcaggttagaaaatattgtatcaacgatcattgtattgccttataccaggttgctgaacatcatgaaaaagttgtaaaccttttgtttgaatacatcccataatgtcagcttaggctttgggacaactgaacccttttcaagctctttaatctgtgcataaattgcatcatgcaccagcgggatcaacgcttctttgtcttcgtctggggtactgaattctactttcagaccatgatcccaaaacaccttatgaatataaaccagatgcgcaacacctttttcatcgttaatcagaagttcctgaataacatctttcatcgcttcatcaatataattctttgctttgctctcgatatccatacattgcctcggttatggggccgaagccccatagtttttataaaatttcgttgtcttcttcgatatcatcaaatgattctgggatatcgtcatcatccagatcaggatctgggatgctatcagtgctgtataaatcttccagcgcggaaccatcactgatttcacgatcagggatcttatacttttcttcgatagctttcaagaatggttgatgagtaaacagaggacgccagaattcaacgctatttgtttctgactcacgccatttcttttcttcaacttcgagttcgccagtctcggtattcaggaaagcgcggttgcgccagcctttggttacggtctgtacaaagttcatttccattgccagatccaaaaggccagaatacatactaataccgccttcataggtaacatgcagcgggaattttgatttctctttcacgaatcgagatttttcgatgttcatgatgaaatcataacccactacctcagtaccttctttcacctgttgtttacccaggatgatcgcggtatcagcggaatacattaaaccagtaccaccggaaataactttcttgctgtacatttcttgtgtgtcataggtatgacagatacaaaccatcgggatatccaggtcagccaaataaggcgtaaccatacggaacatgccttttaatgcttttgctcgcgtcatatcctgtttatcgttatcagacagcgcgtcagcaagttcttttttacttgccgtgttgcctactgagtcaacgaatacaatcaccttatcaccgcgttcaagcgcgttaagctggcttacaacgtcattacgcaactgctcgaccgtcgtgatacgagtatacacaacacgatccggatcaacacccattgatttcagataggatttagtaacacctttttctgaatcgtagaacaggcacacagcatcttcatacgttttgagataagccgctacagtcagcaaacctaagttggatttgaagtgtttggacgggccagcgaaaagggtaagaccagaagttaggccaccgttaaacgcaccggacaacgccagattcagaatcggcacacgggttcgcgtgatggtaatattgttgaatacgtcgctttcagaaagtacagatgcagtttggctattcgagtttttgatcagtttttttagtagtgctttgtttgacatttaatttttccgatttattcattctcattctatatatctcactagttaatgaaaggggccgaagcccctagagtttaccagtcaccgaacagatcgtttaaactggcacgtttttcataatcaattttacatacttctgtgatgttagtcaatggactaataacatgtttttcaaacatacccggataatctacccatgccagaatatcactttcgatctctgctggtagtctatttccagattgccacgcgatgcaatcagcttgccacgggtttttatcccttaatggtagaaccattaccttttcaccttccatgattggtgtaacaccatcaataccagcagtgaaacggttaaagaacaacacccctttaatatggtttggtgttcccttgattggatagccagccccatcacgatatttcgaaatgttgttggcagatgatacaccagcaatttccctgtagtcaagttccttatattcttcttcgaactttttataatgttcgtgtaaagataattcaccttcttgcaggatacggcggatcgcttctttcaggaatactttcacagaggtcggagtactcgaacgctgtgtttccatacccatgattttcaatttcggtttttcatagcgagttccttcggagtcccacacgttagccgcatatcgttttttagcagtccagaaacttcccaacccttcggaacccaacggaggcccagaaatgatttcacgatccataaacatcaggtgttccacgttgttcatgtattcgcaaagttcacgataccctttatcgatcattggttccattctttctttagcaaagcgatccaggaagtcaacccaatggttattatccttaaatttagcctcaccaccaacttttgcaatcacgttatccatacaaacataaatggagtcagtatcacagtatcgaacatatgcatgatccgtagtaccgcacaggtcgttaagatattcgtttaccttacgttcaatccactggatagccaactgcccaaacatggtgatcgcgctggcgtttcgtagatcgaagtatcggaagtgttcgttacccaacgcaccataaagggagttgatagaaatcttacggttaagctgtgctgtgttcgcttgtgcgatcttcttctcacatacgcgcttaactgctttaagcatttgttttgtaagagttttcagaactgctttcgattcatcactgaaatctgtatagaaatcaaagtcaggatcgatcatttggttatgtgcgtctgttaagtgttcgagttcgtgcttgatgagttcaagatttcgctcacccgccatcattctttttttccacatcttacgctgatcaaatactttcttgatctctacggggatcacgcctttgatatcacggcggaacatccacccgttaggagaacagctaaattcatcgctagggcgcggcgcggtcttattaatatactcttcaagagcacgtaccgcaaaacttcccataatcgtttcagggcttatattcacctgtcggatgatggaagggtacaggcttgttaagtcaaacgataccatgtatttgtaaggcccaggaactggatccttcacaaatgccccagggtaaggggttttagtatggcgtctgttttccggaataacaaccttatcttcacgcagagagttataaatgatcgcgtcccacgttttcagcggagacataacccctgggaagttaatttttgcatagtacgctacagacagaaccagttcaataaagtttcgtttaccgtcgatatcaagtacgcggataacgtcaacaatgttgtacgtgatgtacagttggtgatcgcgctggcgtagttcagacagggaaccttcatactcaactttatttttaccagtttcgtattccgcgatcgcgtccaggcggtaagatggttgcggggtaaagctgaatttcttatacagcgccataccatccatttgagcaacgccggaaatatcatatcctaattgttcgttgccgtaagcgtcagtagtggttctggcggttactttaccaaatgggctaaaatgccttaccacgttttgaccgaaaatgttcaggtatcgcgtgatgatatatgcaatatcgaatttgtcagagttccatccggttacaataacaggggttcgctctttccaatctttgatatacgcagacaataacgacttctcggtctggaaagaccgataaacaattttgtttaaatcttcttcgctaatgtctttgcgatcaacgttttccgcgcaccattccgcaaggccaccctcaaccagatcgtatacatagaatttatcttcaatgctatcgtaatgggtaatcgcatcgattggatattttgcttcacgtggatccggaaattctggagcggtcacctcgatatcgatagaagcaatgcgaatatgttcgcggttgtattcgatttcattacggtacatgtcagaaatgtaagccagtcggtaatcatccatacctagcgcttccatcccaacatcgcgcatacgctgcatccagtttttagcttctttgatgctgtcaaactgttttttgaggcaaggcttgccgtaaatgtctttgtatggggtttctacgccattcatagcgtgttgatacattacgggcgcatatttcgtcttacgtacctgttcggtgccgttagagtcaacgaagcgctcataaatggtatctcccatttgttcaactgataggtaaaattcattcattggatcttgtcttctccattaatataatgttccattgtaacaccacctacagcaaattcaagtttactcgatgttctaaaaccaacaaaccttctgctaacaagtcacggatctttctcagttgaacaagctggcgttcaagtttaaacccgtcgaataacatgctgaaaatactggaattgacactatgatattttgcttctgcaattccctggttaaccatcatgatagctttgttaaccattagtttcctttccgttactgtatgttcatccagttgacaggttgcgagggaaaccaaatcatcataagcacgttggtcaataacgttatccatacgggccgcgaaaatcttattcatgtaagtgcggatcattgcgcgtcctccattcttttcataaagacttcttttgcttgttggatcaagtccagagattttttaatacgctcatagaaatgagtggtttcaacttgattgcataacaatgtgtactctgaaatgttacgatcgtaaaatccaggaaagtagtgttgtgcatagctgtaagtgcgggtatctgacagattgcaagttaacgataacaagatgtcatcttttacaatcgggatgatcaaagtttcgttggatttgattgaatccatgatttcgttaatagtcataatatatccctctcaatggtgtacacccaatataacaaagcccctgcacgaatgcaagggctttttgattagtgaccgatccggtacttgtacttgaggatccaatctgctttttgcgagtgagtcagtacgcggaagttgttttcttctgcaaacttcaacccagtggttacaatcttaaccatgccccactcttcgagaagtcgcgcaatgttgttccggcgtagttcgtcttcttccgtcatatcgacttgacgaccatcgagtttcaacagttctttaaaatgcacgataaaatacttaccttgctttttcagaatgtggcacgattgccagagcattttctttttgttgtttgcaataccaatacgggttagcgtttcacggatctttaaaaaagaatcgtcgctgattagttgaatttctaacatacatcaccattgtttaatcaatttttccaatttcttttgttcagctttgtttttcacaatacccaacaaagacagagcgacctttgcgtgttttcttttccaatcctcgaacattccgaggtctttaagttcctgcaaatattccatcgctgtacgtgtatttacactgtatttttcgcgaagaatttcgataataattttctcttcaaaatcttccgatagtttagcccatgcaccgaagcgtttagccttcctaacagagttgagataatagttatagtgcatttggtcagagatactaccgcctaccagattcatcacatacgcgttgtatatcgtgtctatgtgctggctcattgcgttgtctacaaagtacttatcatacacttcatcgataaccagcggcgttttaccgttgttgatttcgtctatgatgttaaacaaggtgttttctttatccttgccgtactctttgaccagttcttcaaccttatcccaatctttagaaagccaagcggattcatgcggggataactcttcttcatccagaaattccgccaggctcatgattatgcctcccagaccatagaaagcatcaggttcatcaacagatattgcagatgaatttctttattcatcgccagcccgtattgcgcgttgttttcgcctacaatctggatcagtgcgattttagaatcctgattcacgataggataaatcgtatcagtcaattttccgataaaggtatcgtattctgacgcatatttaataacctcagagcgcaaccctttatagttcttttctttcaacagggtaatgatatgagacacatcagaaccaacgatctcatttaggatcccagcatcaatttcaccacgtttcgagtagaacccgatcgctttgataatagaacgcgcatccggataatgctctttaacaaacgctgcaatgactttagggtcatacttgatattctcgatttcaaggataccgaaacaacgcttgattaactgtttcatcagttcgatacgttcagcatcagacggaacaccgaatttaacaggaggacaacgagaaagcagagcactatgcacaccgttaatgttgttcgccgttacaatcacagaaacgtttttactgtatgcttcgataaagctacgcaagtgtttctgtgcttccgccataccagaacgatcgaattcatcaatgatgataatctttccgcctggtttctgcgtcattgatgaagcaaaacgatccagttcattacgaatgaagtttacaccacagttcgaaccgttgacaaagaacacctcagcatcaacctcacgggccaacacaagcgcgagggtcgttttaccagtgccaggggaatcagatacaagggtcatgttctcaacacgcccagatttgattatgccccgcatagcggctttgtcaccagaaggtaaaatacactcttcaatcgttgttgggcgatagcgctgatcccatgcaaattcatcaggagatcgggagattttaccgtatttggtttcgatgatttcaatattttcactaagttccataatataccttcaaaataaatggtgtaaaagaaaggggccgtagccccttaaaactatcttacttgaatgtgctacttgcttcaagtacgacgacgtaagcaacgccgttatcagaagagaattttgcggcccctttggaggaaatctctactttgtaatcgctgttgatgaactgcatgttatcaatcttcatatcaaaattgaaaacattgtcgccttcatactcaccgacttcaacagagaaagttgattgactttctttgcttttcgcggtaatgaccagtttaccatcaatcggttcaacggacaggtcggtcagtttcatcatgcgagacgctttgatcagtttttcgaaatcgttagcggtaatctggaaaatcagatctgctactggcatcaccagacgttttttcggtttcgggatcgttgttgcgtctgctgaacgttcgatgatcttcatcttgtcgccgcgaatcacgatttcaccagtggaaatatcatgagtgatttccgcgtcagtgccgacgatgttcagcatgttcaggaatgagttgagatcgtagataccaacatcttcatcaatcacatcagcaatttcagcttctgcgtatacaacgctgttgattgatttcgtcatgatgaatgaacctttggtcaacatgatcgaagagttgatttgagaaaagtttttcaggatatcaatagtttgtttagagaatttcatattcagcctttagttttcaataagtgttacttaataagtgattttacaacggtttccgctgctgtgtcaagcatatcagccatttctttaacggttgtacgcttcggatcttcgcgtcgttcgctggtaagtttacgatgttccgcaaccactttttcatcaatgtcacgatagtgtttaaaacgttcctcttgaggcatagctttaaacagttcttttgtttcgtccgagagtttagcaacccaagatttacggacgcggttcatgtagtcaacaaaaacattactttcattcatatatttcttctctaacttagaattctttgagtgggggccgaagcccccgcttgtattacatgtctaacagtttatccaggtcatcatcaccggagctatcagaatcatccagatcgaacggtacgccgtcatcttcgcctaccggaaccgatgcaacaccaccagatgatttcacatcagatgtctgattgtcaaacttagccatttcgttatcgaagttgctcagttcgctatcaaggtcagcggaagcgctggaaccagcagaaccgatcgaactacccataactttattgaagcgagtggtcaggtcagccagcggtttaaattcgctttcagcggtaatcgggcggagatcgctcataccttcgaaaattgctttctgaacttcttcatcgtcgatgtttttgatcttagccggaacaccaaacgaactatcgtcatagttaggccaatcaccaacttttttcgctttcagggtgaagttagcaccatcaaacggacaggttacagcaatacccggttcatcaagttctggattaccgttaattgcggcggtgatcttgtccatgattttcttaccgaagcggtatttgaacaccttaccttcgttttctggagcgcctgggtctttaacgatcaggacgttagcccagaaactttgtttacgaccgatctggctcagtagcttatcttctggcccgtttttgttggctttagccttctcatacagatcgttttcggaaatgtacttacatgcaggacagccgtcataatcgccgtgggtagaggaacagttctcaatgtaccactggttgtttttcttgaaagagtggctcacgatacggacgaacgccagttcatcatcggaacgtgctgggaggaatcgaataacggcggaaccgtttttctgtgcgtccagggtcagtttccattctttctcatctttctggaagccggaaccacctttcagatttgctacctgtgcctggagtttagcgggatcttgacgtttaaaaatgctgctcatattctgttttctcgtttagtttagtttgattaacgtttgtttcattaagtttcgatattttatgatatctttttcagtaaggtcaaatatttttctgtatgcctttaacttaatgctaaagtcagaccaaataatatcatcagctacttgatcgtgtttatttatgatacctaaaaatgagtcaaaaatcaaaaacgattcgtaagatatcacatttgacaggacaagtttgcttatgtaggacgttgatgatttttcgctgtacttgaacaccagagacacggggatctctttcattttggcgaattcgtacacgtttttaacgtcatccacaaacacgttatctagtctttgtaactttcctatgtactgcctgtaaaagacaatactatcttcatcaacatcgcctacccagaaatccggattggctacgaagttggataggaatataaaatagatttctttgaatgtaaagcgttgagctaattttacaaagaaatatctatcctttcgcttgttaaaggcgttttcactaactttgatctgccagttgtattgaaggacatcaaaacgcccctggaaatgagttttcatcgccagatataacttgtatacagacaaaggcacaagccgtgaattcgcctcactatcagcaaacggagctttaaatctcacatgaagccgtccagagtggttgatgaactatgttcaagcgcaaccgatgggcgaagcatgtttcctttgatcgcttcgtcgctaatcttatcaaggatcgcgcgaggaaccgttttattcagcatcgcataatcaatggaattttcatccatccattgtagcgttgcttctatgtaggttgccccctcagaggcaaccaaattttcgatatacaaaccgacttcggttttatttccgatcatgctttacgccttatcgatcatatcatacagttcgatcagttcgttgttttcttcttcgaaagcggtacgggcctgttcgtgatacagtttgaacagcttcccgaaggtttttccgtcgataccgaaatcagtttttgctttggatttgatatccttgaacgtaccgttgaagatctcaacttgagttttcacgttggatgcttctttgatcagttcttttacctgttttgctacatcagggtttgtttgtaaaaattctacactcattttgttacctcaaaaatcactcagtttttcgaacatacgggaaagtttgttatccatgaagtaacgttccattttggctttacttccggattttggagtattatacgcttcaataatcgaattttcaatatcttttggtataaattcgaaatcgcgtagttcctcgttttctttgtaacgtgcggcccattcaggggtcatcaacgttgtagggtcgtctgcctccagccatgcctctaactcagaggattttaccgctggggcgcgttcgccttcaaccttcgtcacaatataatcatttctaattttaatgcaagcgatactatcttttttatcgcctttgatatttttgtatcgcagatcgttacgtggtgaaccgtgcttaggcgttacccattttttctggggaggcgaccattgacgaacaccgttatatttctgtagttgtgtaaagtcgctatcagcagaaaccactaatactcgtctaccttcaccaacagcttttttcgtaacaacagcaattatatcatcagcttccgcgaattcaacctttaatccaagataaggcatattctgacggatttcttcgaacactgggttcaggaagttgttcagacgatcccaatcccattctgattcttcatgttcgatctgacgacgttttttgtagtaccaggccttttgcctacgccagtaatttctgtcatcgaaggcaatcacgatttctggatactcacctttaaattttacaacgttaaaccgtaaagtgtcaagcaccagatgacgaatcatttcgatcgtgatggatgcttgttcctttggtttgaagttgttcattagtgtagcgatggaaatgttagagatatcgatgaccatagtatcatcgggttccccttcatcttgcatcaacttgttcaagttaaacatgcttgcaaaactgctcatatatacctcaatttttcaaagaacggggttattgtagtaacttacgaaatgaagtcaataaaaaagaccataaaatttttgatcaataatacttgatctgatcaaatttatgatctataatttattaattaataattattttactacaatgatcattgtaggtcaagtactaaaatcaataaattttatataatttagatctgatctatagatcattagatctactttaaccttaaataatatagaatgaaatttgattttgtctacagttattatataatattcttaacttcaaagaggaaatatgaatactatgactaaagaaacaaccaatatctacgcagacaatgaaaaattataccctatcctctgtgcatggaaaaagcaaatcgccgaaacaggtgatcgcaaaatgcctaatgagttaggtgctgctattatggatattgcaaacgggctatcacgtcgttacaacttcaaccgttattccgaagattggaaaatggatatgattgatgacggaatttccgctgcaatctcaggactgcataacttcgatgaaactcgttataccaacgtttacggttacattaacaaagcatgttggcaagcattcgtaacacgtattctgtacgagaaaaaagagaacgcgaagaaatataaattcttccttgagcacgtttacgactgcgaagattcggatatggttagtattgcagacgaaggtttcattcaagatctacatgacaaactatctcagtacgaggcttccgccaccaaaaccaaagacaaggaagcggaagtattcccaacattggaagattttctatgaaagcaataattgacttaaacaaaatattaactgatatcgattacgaaattgacttgctaccctacttcgtaaaattagagttgcaaaacgtgggaatcccggttatcatcgatccaactgacgtaagaaactccgatttcgaagtagaagaaggggttttgtcttatatgataaacgccgaaactatgatcatggagatcacttatgattgatgaagagaaagaagtactaaccagtgtggaagaagtggatccggaagaggaaattcgacaaaagatccaggcacgtgtagaagccgacgcattgaagcgagcacaaaaattcattaagaagaaccggactgagatcaaacgcctccgtagacacgcagaggaagccctattcaggggtaataaggttcagtatgtgtatgcggttaagaaactccgtgatatgctcaaacagccgtatacagaggatttcattgatacgatgtggaacacttcactagcatcaattcgaaatattgtagcttcacaacagaagcactaacaaacaagtagccccgaaaggggctatgagggtcttatgagaaagtacttaatgatcggggatactcacgctggcttgcgtcaggacaacccctggaatgaagaaaacctatacaatgtattcgtgcaaatcgtagaacactgcaaagcaaacggcattaccgaggctttccatgctggtgatttctttgatgtgcgaaaggccaccacacaaaccacgatgaaattcattcgtgaacgtattgtgccactactggaagaagccggattacatatctatgttctggttgggaaccacgattgccagtttaaagacaagatccgccctaactcgccgcgagagattcttgatcagtatgattgctttactgttgttgatgaaccgatgacagtaaatcttgatacttctccactacaatcaatcgatttgatcccgtggatttgtcaagaaaacacacagcagatttttgatttcatcaaaaagtcaaaatctcaatactgcttaggacactttgaactgtccggatattatttctataagaacagtaaagcggatcatgggcttgaacctgatttcttaaagaaatatgacatcgtgtattcaggccactatcatcacgctaacgaaggcgctaacgttttctatatcggcacaccgcttaccatgagcgcgaacgatgaggacgaaaccaggggcttctatgagctatcttatggcgatggtaaacgtgaattaactttcattgctaacccagtgtgccaccatcgccggatcacttatccggatcaaaaagatgttgatgttgctgattacaaaaattgctctgttcgtttgattgtacgcgaagttgataacgatttgcctaagtttcaaacaaaactggaagaaacagtttatgagttgaacattgtcgatcgcgtgatcacagattcagaagttgatactgactttgaaatcaaaagtgtatctggattgattagtgagtacatcaacaacatgcagatcactccagaagaaaagaccgaagtatctgcaataatgagtgcattgtatgcagaggttacgagcaatggaaatagttgattacgttaatattttaaacgaagaagggcgatataaagccctttataaaatgtttggatttgatgtgattgttgcagtacagcaggattcctataacgagtatgtgtcattggggttcactctgattaaagacaactatcacgaaacaaaggtttggacatttactgtcctgaatagcatggatgaagattccgtgatatactgctttgatagcacgattacaaacatgattagtgatatatcccaaaggataattgatgaaactcaaatttaaaacattgacttatcaaaatatcttgtcggttggtaacgtaccgatcgtcattgattttgattcagcaaagaaaaccctcattacgggtaaaaacggcggtggtaaatccaccatgatcgaagcgcttacatatgctctctttggtaagtcatttcgcgatctgaaagtcgggcaactggtgaacagtatcaacaagaaaaaatgtctggttgaactgttgatcgaatacggcaatgatgaatataaaatcatccgtggacaaaagccgaaagtatttgagatctggaagaatggcgaaaaactgccggaagattcagccgctggtgattatcagtcacagcttgaatcaatgttgaatattaacctggtgggctttaaacaggttatcgttctgggtactgctggttacgttcctttcatggaactgaaaacaccagatcgccgtaaattggttgaagatttgctgtctctgtctattatcagtgaaatggacaaactgaacaaatcatacatccgtggtgttaaccgtgaactggatacgctttcaatgcagattggacacgtacaacagcagatcgcaacacatcaaaagttcattgacgaacaacgggcaaaagcaaatcagaatacggcgcgttaccaggatatctacgattcccacgtagaaacagcaaaacagattaaagcgcaattagttgaacttcaaacccagatcgcagaatgtgtgatcaatggtgaagaccaaacagcaaatattcaaaaactgcgtgatggctatacacgcctctcaatgaacgtagaacagttgcagcgtcttgaggtgatgtatcgcaagggtggtgaatgtccggcctgtaaacagccaattagccccactcctgaacgcatggaagagattgccgagaatattaaaaacggtactcagaaacttacgctgattaagaacaaacaagatcagctacagaaaatcatggatgatttactaacacaacaacgtacactaaatgggctgaaatccaaatacgaatcactacgcggtacacttcaaaatgaagttgcagcggctaaacgtgttcgggctgtcatggataaagcacaggaagacgtggtgatcgacgaatccccagttgaaaaactccgtgaagatgaaaaggaacttgattctaaacgttctggatttgtcaaggaaaaatatttcagaggtattgttacggatctgctgaaagattccggcgttaaagcgagcatcgttaaacgttatattccttacttcaataaacagattgcgtactatctggatctgttgggtgctgattatcagttcactctggatgacgaatttaacgaatcgattaaatcgctgggtcgtaatgattttagttacgcatcgttcagtcaaggcgaaagagcacgtattaaccttgcattgcttatgacgtggcgcgacgtaaccagtaaaatttctggtgttgatttatcccttctgatcctggatgaagtgtacgatggtgcaattgatcgtgatggtagttttgccgtaaaagcgctattggatgggataaatggtaacgtaattgttatcagtcatcaggatttagatccggaagatttcgaccgacatattgttatgtcaaaagtcggtcgattctctaaaatggaagttaagaagtcttaaacttgcagttatcaaaatgccagcgattcatattgctggcatcaccagatttattgcaatatggacaaatcaactgtttcctttttgcctgggtctttctatctgggttatttctgcaatacggtatatgtgaacgcagataatgtaatgaagattctgttccgcaatatggacaattccccctttctttaggtacgtttccgttcttatgggaacacgggataccctcaaacttatgtttcaatccttcattacctggtttcagtttgcagttgtcgaagtgccaacgagtcatatttccaattatacctgattttccgcaatgaggacatacaaccctttcttgttgctttttggctttactcattcgctgtctggtttcttcggtgaactctctgttcctatgtgcttctgacgcctttttctttaaccattcatagcggcggttagctgttctttcctttgatctattggaaccaactgttaacatatgtgctgcaaaaacaagtttgttgtttcctgggtacatcttgactaataacagatgtgcaatataatgttgacgtgctgtaagattaaccaaattatcatcagaatctgttccacctatgcacttaggtatgatatggtgtgattctgtatatccatcatactgcgtttgtttagcatgttctatgatagagttataaattttgttatagttcataaacatatctcttgtttgatgggccgttagatacccctatttaagaggatgaaattatgttattagaaaaatcttttgaattagaaaccgctctggaaatagatcggttttatctccacaacaattttcttgaagaaaaacatatagttactatgaaagatgttgaggaagcattcaaagataaccctatagagttgacgcgaatcaagaacaacaaaagttctgtttggttcctcgaaaaaatctattgaccgaaatccataaatacagtaaagtagcccatgtaacgaaacgtgggctttgtttttatttgaggaacaataaatgatcactgaatccaaaatgacttatcaggaagcactgaaagttttgggcgcaactggtagcgaaaccagcgctgaaatgtccagactcttcaaacgtgcatccttacgcaatcaccccgaccgtggtggtagcaatgaattaatgcagaaaattaaccaggcttacgacgtagttacaaaaactgggcctagtggcgcacgttctgagactgctggtgatgttcgcgcacgttatgcacgtcaaaagaaagaatgggaagaaaaagttgatgcttactttgtagtggcgaaaaactatttcagcaccaaatttaacgcacaggaatttgcggaatacttcaccaaatacactggattgcctaccactttcaaacaggaagtaacaaaaggtagtcacggtgtttatgcttcgttccgtttcacttctggtgatgcttactttgatttcggtttcaactgcacccctccgaatggacaagggttagccgctccggattcatctgcactgggtaacgtttctgttagtacctttgtactggttggaactaaaaaacataaaatggcaagccgtgattatcaatggggcaaaaacccagataagatcactccggaaagcctgttcccgtctaaaaaactggaaagcattttcagccctgtacagaaaaatatcaaatacaaacgtgctgattaccttgcatcattccgtaagctgttaggcgctgacattagcggaaacgatatctttgttgaagttggtacactgaaagttcgtttctatcgtcacgtattcatgcgcaaaggtgcttatgtgtttagcgcggtgtatgatcctgctgtatcgaagtatcgtccggctgcacaacttcgcggaaccatgttcgaagacgaggacggcgcttgcctggatatgatcgttgatacgttcaaagagttgcagaaactgaaaccgagtgttcaaggcgttgtgaacgcgatcgataagatgaacgcagagtttgcggcggggcatcgttcagcatcttttgttaaacgtgtggctgctcaggaagccgcaccgaagccagaagagaagccaaaacgcactgttaatcgtatcggtaaagaggaatacttcgcagcactaaaagatattggtgctcgtgtaatgcctaccagcggttatgttgaatttgataacggcgctggtgttactatcaacttcaagcgtattgttgtaaaccgtaaagcatactactcattcagtagctttgatttcatgtactctggtcagaaacacattgagtggttgaaaggaatcgatatcgcagaagataccaaaggcgcaagcattagcctactcactgatactctgaaatctttacgtgggatctctgactggaacactgttaagagcgctttagatcaaatgaattctaacttcaaggcgggtaaattctccgcacctcatgtgaagaaggaagcagagcaaaaagcaccgaaacagaaagacgaaatcggcgcacagcctaccaaaccacaggcggctaagaaagatacaccagaagtggaaaaatcacaggctgttcatgcagcacgtgagaaagcgaatatgaacaacactattcgtaaaatgatgactatgttagtcaaagcacagcgcaaagacactccggaagatatcaagaaggaagttgatgcagcaattcaattgtggcgcttgacttactaatcaaatgaactataatgggaactgttaacgcagttccctttttatttgaggaaaatattatgagttgtccaacatggttacgtttggaaaatccgaaagaaggtacacaaaaacgaatttatattaatcttggttgggttccacctacagattttcaaatggctgagattttaatcaacgctattaaagaagtaagcgacacttacgaatgggaaaggctctattttcctttaattggtttgtatatgacgcgaaataaatttgaagaaatgaaacttgctgttattcgcgctacgattattaattcccaacaaagatttactttgaaaaatgcatggagttctgaatgattattcaagtatctgtacagggtgacactctgactgtcaccgaatccatcaataccgctcttgctgtatgtcgtgaccatatctcacaaaatcctccagtgactgagatcctggaaattgatgtttgggatcagattgggatgatcgacgcatcatatggatttaccccgcgagatgaagaactatctcgtatcgaatcatggctgaatgaacaggaaacggaatgaaactccctaagaacacaacactactaacccgcgaaaaacttcactctgttgattggtgtcctctggatatcatgatttttgatattgaatctcgcgtgatcaatgcaaaatatcaggggtgtagtattttctctgttgaattcgagaagattcgcgggtatgatgagaagtacaaagaaaaactgaaagttatgattgaagcattgggctatattgtaactgttgaagacaataaaatgtggatcgcaatatgagcatagtaaaagcggtgtttgcattggggcacgatatctaccacgatgatttcgcttttggatatcagcaaggcttgccgtggggccactgtaaagaagatttacagaacttcaaagaagaaaccgccgatagcgttctgattatgggtgcaaatacgtttacctctcttccgggtaaattgcctggtagaattcattgcgttctgtctggttccggtagttttttgaaaaccaaaaaaggcgaggttgctgattacgtgatccacggtggcgggttgtctgctgctattggtacaatgcaagcaacacacccagataaaaatgtgtgtgtcattggtggtaaggggttgcttttagattcaatcaataataaaatggttgatgaagtagttttgacacacatttacggacatcatgtatataatgcccccgcatttaaacgcgatgtttcgtttactgcttctgaattgggtgatgcattgttaaaatatgaattttctgatttcgaaactcagtacatcaaagaacatgaacgcattgaaaaaatcatagtcgatcgatataaaaaggtataaaatgaaacaatatctggatattattaaacttgtacttgataacggtgttgaatcaactgatcgcactggtgtaggtactattcgtattttcggcgcacaagcccgatgggatctaaacagaggtttccccgcaactacctgtaaaaaactattcttcaaaccgtgcaagcatgaattgcaatggttcctgtccggttcaaccaacgttgaagaacttcgccggatgacctggggtgaaaatagcgataagcgcacaatctgggatgataactatgaaaaacaagctattgatttaggatatgattctggttatctggggccaatctacggtcatcaatggcgttcgtttggttctctttatggggatgatgatagttattatggcggtagtggtgttgaccagatagcaaaagtcattgaacaactgaaatcaaccccagacgatcgtgggatcatcgtttcggcatggaaccccgttgatcttgatgatatggcattgcgtccgtgtcactgtttctttcagttcgttgtaatcaacggtaaactgtctctacagtggtatcagcgttcagttgatgtcttcttagggttgccgttcaatatcgcctcctatgctctcctgacgcatattatcgctgatatttgcgggtacgaagtgggcgatctggtttggactggtggtgatgtccatatctataaaaatgcggttgaacaggcaaaagaacttttacagcctaaccgttcaccaatgccattaccgattctaaaaatgccgaaggtaaatagcttacttgatttagatcaagaattctttgactcgataaccttagaagggtatcataatcacggctctctaaaagctgaaatggcagtatgaaaaatggggcttcggcccctttcttaacaaggtaagagaatgaatgacattaaagtagtagtaaaatcctctggtgtacgccagccgtttgacaaagaaaaaatatacaaagtgctcaagtgggcctgtgatggtcataatatcgatgttcgtgcattccttgaaaatgtattagaactgatccgcgatggtatgactaccaaacaaattcaacgtatcgctatcaagtatgcagcagatcatatttctgttaaagaaccggattggcaatacgtagcatcgaatcttgaaatgtttgcattgcgtaaagacgtttacggtcagttcgatcctatcccgttctacgatcacatcgttaaaatggttgaagcggggaaatacgataaagagatcctggaaaaatacagcaagcaagatattcaagttttcgaacgtgcaattgatcatgataaggattttgaattttcgtatgctggttcccaacagttaatcgggaaatatctggttcaggatcgcgatactggcgaaatctttgaaacccctcagtatgcgtttatgcttattgcgatgtgtctgcatcaggaagaaactgggttagcacaggttacgcatatcgttgatttttataacgcaatttccgatcgcaaactgtctctaccgactccaattatggcgggtgtacgtactcctacgcgccagttctctagttgtgtagtaattgaatcgggtgattctcttggttctcttaacgctgtaacctctgcgatcgtgaagtatatttcacaacgtgctggtattggggttaacgcgggacatattcgcgcaatgggttctaaaatccgtggtggtgaagctgttcatactggtgtgattcctttctggaaacatattcaaaccgctgttaaatcctgttcacagggtggcgttcgtggtggtgctgcaacactgtattatcctttctggcatctggaagttgaaaaccttctggtgttgaagaacaacaaaggcgtagaagaaaaccgcgttcgtcatcttgattatggtgtacagcttaaccagttgatgtataaacgcttaatgaatcgtgattacattacgctgtttagtccggatgttgctaacgatcgtctgtatgatctgttctatgaagctgatcagactgcatttgaagaactgtatgaaagcctggaaaaagatccaactgttcgtaagaaacgcatcaaagcggttgacctgttccaacttttagcacaggaacgcgcacagacaggacgcaaatacattttcaacactcatcacgtcaaccaacagggtagttttacggttcctgtccgtatgtctaacctgtgttgtgagattgcgatcccaacgtcgccgctggatgacgatgataaaatggctggtgaaatcggattgtgtacgctaatggctatcgttctggataacgctgatatcagcgaattcccgaaactcacgcgtattgcagtacgtgcgcttgataacctgttggattaccagaactaccctgtaaaagccgctctgaaagctaaacagcgtcgttctctgggtgttggtatcaccaactatgcatcatggttagcaagcaactattgcgactactcagaagcgtatacagacaaagttcatgagttaatggaagcgtttcagtttaaccttctcgttgcttctatggaactggcgaaagaacgtggtgcgtgtggattgtacaacgataccaaatacgctcgcggattactgcctatcgattggtattgcaaaactgttgatgaactggtagcacctgtttataattgcgattgggaatggttacgcagccagattaaaaaatacggcttgcgcaactctactctttctgctttaatgccttgtgaaagtagttcacaggttagtaactctaccaacgggatcgaacctccgcgcggtttagtgagtatcaaatcttcgaaagaaggacactataaccaggttgtgccaaaccaaaataaccagattgatttctatgatctgctctgggatatggctaaacgcggtaacaaagggtatctgtctcacgtagcagttatgcagaagtttgtagatcagtctatttctgcaaacaccaactatgacccggcaaactatgaagacgggaaagttaaaacagaagacatcattgatgatctgctgtatgctaactactacggtgttaaaaccttgtactatcataatacgcgtgatggtgctggtgatgaagatgaagccgccgacgattgcgcgggttgcaagatttgattaatgccccttcgggggctttttaaaggtaaagacatgttaacagtaatgaatacaaacccagatcataaccacttagaccaacctatgttttttggtgaagatactggtgttgcacgttatgaatcgcagaaacacaaagttttcgaaagcctgacacaaaaacaactttctttcttctggcgtccggaagaagtcgacctgtctactgaccgtatgcagtacgcaaaacttcctgaacatgaaaaaatcattttcgattctaacctacagtatcaaaccctgttagataccattcagggacgtgggcctaacctcgcatttttgccaattgcatccgatgtgagtatggaaacatggatcgaaacgtgggcgtttagtgaaaccattcacagccgtagttacacgcatattcaacgtaacttgcacattgatccttctgtacagttcgaccagatccttcgtaatgaagcgattatgaaacgttccgcatcgatgacacggtattatgatactctgattgatgaatgtcataagctgaaaaccatcatgatgctacaggaacaggttagcggctataaaccaaatgatccggctgtcgtgtattataacgagcaatacactaaacaggccactaagtgcaaagaagcgctgtacctgtgtatgcacgctgtgaacgctctcgaagcgatccgcttctatgtgtcgtttagtttcacctttaactttgctgaacaaggcaagatggaaggcaacgcgaaaattatgcgcctgattgcgcgtgatgaagcattgcatcagaaaggtactcagagtaaaatccgtttgtggcaaatgggtaaagatgatccagaaatggttgaaatctcccgtaggctgaaaaaagaagcaacggctatcttcctggaagtatatgaacaggaaaaagaatgggctgaacatttattctctgttggtgatgtagaaggtgtatcgctgaaaagcactatcgcttatattgaacacctgacagatcagcgtatgcgagcggtcgggcttgattcaccattcaccccgatccctaacccgtatccgtggatgaataaatggctcaaaagtgataacgtacaggttgccccgcaagaggttgaagtaagttcttacctcgtcggaaacctgaatactgaaatcagcgatgaagcgtatgcaaaatgggccagcaaatacgcgtgattgtcgggtagtaaacaagtacaaaactgattgggatgtcgatattcaaagaggtacgaagttcggcaacccttatcacacaggaaccaggggagaaaacattttagcgtttatcccctggttccagaatcaggttcgtactggggcgatcacgattgaagaattgaaagaacttgatggtaagaggcttggttgtacctgtgcgcctcttccctgtcacggtgattacatcgcgcatgtggttaatgttttgtgtggtaagaaaagatcacttgactttttggatatataatgtatgaaatctgaattcaacttaacccttgataaatgtggtcgcatcgatcgaagttttgttaagtgtggtgaacttaggcattgtgtttattttattgcaattaacgatgaaatagtatatgttggtaaatgtcgggatatgtggaagcgtttagacacgtatcgcaatgcaaagtattggagagaagccaaccccagcaacatcttaaaaacgtgtcgattggaaatggctatcaaaaaacgaaaaactgtgaaacttatcgtgactactcacgatgaaaatacatatcatgattatgaaatcaacatgatacgaaaatacaaccctgaatggaataaacagcactatgacaaaggcacaaactaaaattatcaataccctttacaaacaactcatgcagttgtgcggtgaatctgaaacatttttcttcgttgatcaagtaaccgtgatgggtacacctgttcgaatctttaactatcgcatggcctcatatacagactggctaaagcctggtgctctggaatgtcgcggtatcatgtttgaaatgaatggagatacccccgtatcaatcatcagccgccctatggagaagttttttaactatgccgaggtaaaggcatgggaagcgcttaacgagtctcctattgaattaggcgaagttttagacgtgatgattaaagaagatggttccttgatctcaactttccttgacggtggatttctggcggtcaagtctaaaggttcggttaaatcagaacaagctatggatgcgcacagcgtgttaatggcaaatcgtgaattgctgacccgcttaactgagatcgctaaagaaaactatacggtgaacatggaatacgtttccccgaaaaaccgtattgtcgttggttatgattctcctgatctgcgtattctgaacgttcgtcacaacatcacgggtgaatacatcccttatgatgatctgtttgctgacgcgctgttacgtgcgtatctggttaagcgtgagaatatcgaagtactggatctggatgcattcgcaaaagaagcatatcagaatgaaggattcgaaggctatgttgttctgacaacgaaagggtttgtaaaaatcaaaacaaactggtatgtcaatctgcatcgcacaaaagatagcattaccaacaataaggatcttttcctaaatattgttgagaatacggtcgatgacctgaaacagctattcagttcggatctggtctctctgaaaaagattgacgatttcgaaaaacttttccttgatagtctcaatcgtttgagtgcaaaagcgttcaaagccattgaagataataaagggaaatcgcgtaaagattttgctatcagtctaagcgcggatttgtcaaacgacggtcggatcatcttcgggcctcttatgaagtacttcgaagaaaccgatccacaaaaactggtcgatcgcatcattgaaatgatggttaaaaattacgatcagttcattcctgaacaatataaatgaggttcataatgcctaagatatcatcttgggtatggcctgtaatcgtggggctatctttgatagcccttttttacattgcagtcgataccaaaattgaaaacgcatcgttacgcaaggatatcaaatctttgcaagatgatgtgaagaaagtaaaagagacaaatacaagcaatactgttatctacgtggaacaaaaatccaaagatcagcagttagttaaggatgcagggcgcaaacaccttttgtttgagaaacctggattgattgaaatcaaaatcaacaaatccttcgacgaatacatgcaggaatttgaaaaatgaaattagcaatgatagtattacttggtgtttttctcgttggttgtgcggaacagccacctgttaaggtacttcctacgctacccgcaaaggttaacccagtgaaggtaaaatggaaagtaattgcagacgttagagaaatcgacgggaaacaataccttgtaatgccatatgatggtaatccttatgttgcattgacatatccagattcattgattttacgtagctggatgaatgacgttaaaagacaaaaggatcaaaccgataatgttctgtgtacgttaggataccctgagaaatgcaaatcaaaataaccaaaaccttttttcgtgacataacagaaggaaaagtgtatactgcgaaaaaggataaagaaggtctatggatagaaaatgactggaaccgtgatatgtggctcaatcttacgaatgagcataacaaagaactaattgaatatgagatagtgaaatgaatctgtttatgactattggcgttccgggtagtggaaaaactacctgggcgcatgagaaagcccgtgaattgggtaatactgttacgatctctcgcgatgatctgcgtagctctttgtataatgctggtaaaggtgctggcggatacaaatacaccaaagcgaaagaagaaatgattgcagaaatgcaagatcacgttgttatctctactctgaaagatggtaaaaacgtgatcatacacaacacgcatctgaaagaaagtgataaaaatcactggcgtgaaattgcattggaacacaaggcagattttcatattgaatattttgatgtgtccattgttgaattgcttcgccgtaaccacaaacgcggtcgtgatgcattacccgtttcgcgtgtttgggaaatgtttaaccagtatcgtaagatccgtgggttcgtaccagcaatggaaattgttaatccacacaatcagaagtgtgtgatctttgatgttgacggtacgctaacaaaagtagggcaacgtagcccgtatgactttaccaaagtgatcaatgatccgccaaacatcccgatacaacaactgtttcacctgtacaaaaatgcagggtataaatgcgttgttgtatctgggcgtgaaggtaatccgcaatgcgcacatgatacatgggttagcctgttaagttatggtgttgaaccggatgaaatttttatgcgtcaagaaggcgataccaggacagattttgaagtaaaagaagaaattttgtttgacaagattttagataagtattatcctgttattgcagtggacgatagagacactccggtcggaatgtggcgagcaaacgggattccgtgcttacaagtcgattatggtgatttctgattgacatctaatgtgggtatgttaaagtacccacacaaaagaggattacattatgaacgttattcgtgaagataaaggcatcatggttgaacttggtgatcgcattcgcgtagaaaatctgggcgattttaaccaaaaagttcgtttgttgtgccaaaaaattgctaacaaaattcaggaacagggaaaagcaccaggcgggtttgaagttagcgccactccggtttctcagtactcctacattgtttatattcatgacttggatactaacagcacccaatctttcgggctggtgttaaatccaattactggctacgttacatggtcggctgtattatgaaagtaaaagtaattgatagagcggtgatcacggacgaatctgtatatccggatcctcgttattatggcggcgttttcggatacatcaagggaactgatattgatgtagtaacaagtccgatcgcagaatatgatatcaacaaaaatcagacagaagttcgcgttactacaatcaacggttcagagtatatcgttgaagcgactcctgattttatcaaacaactactaaaggtgatgaaagatgcttgatcatcctggctctatgagtatggtgctcctggaagcattaaaagtatataatatcccttgtcatttcggtgaagtaactgttaatactatcgttgacgaaatcgacaacccaaatactttcattgcttgtcttgttcgaaaattcacaagttgttttcgtccgagtccggaaaaagtagtaattagttctgtttctgcacatcatcgagtgttagatgatggaaagattcaagtttactggaaagttctttatcacgtggtatatcatgaagattgatgatattatgtttatgcttagagcggtaagcgcttctaagttctctcaatgcgtctctgttaatgtcggtgctgcgttgagaaatggtaacgggcgtgtgtttgtaggcgcaaataataccgttgatcctagtcatcgttgtacagatcagtgcaatcacttattagatgataacgggaaactgagtgaagaaaagcgccctgaacattcacaatggtcagatctcaacgaagtacacgcagaaatgcgcgttattatgctggcggcgtctcatgaacaaatcaaagacgcaactttgtatacaactcattccccttgctcacaatgtgcgaaaaatatcgaattttgtgttgcaacaggtatgattaagcgtgtagtatatctacataaatacgatcgtggtggcatcgagtggatatggcgtctacagcaatacggtgccgaagtagtacaacttgatcccgaagaattgaataaacatttccggatcaaataaccaatgagtaaatgtatgtctgaactgagtgtaaaagcatcctttgaatatgttctgattgaaaccaacgctaaagcggctggaactgaaattgtatcaccttctggtattgtgactggtgttcgtcaacacggcgaggaaccgatctacggcacagtgttatcatgtgggccggatgtaccggaagaatataaaaccctgcttatgggtaagcgcgtaccgcttcctcatgcacaaatggcaaacgtgcctgatcctgaactgattgcaggaaaggcaacaaaagaagaagctcgcaagtatccggttaaatatgtaaccgcacactataaagcgattcaagcaatttacgaataagagatccaacatggctaaacaaattcaagcaatcatcgccgataccgtcgcaaaatctaaaaaacttttcgacaaaggcgacatcctcgaagcaccgacccgcatcgatgtaatgacttcaatgatcattgatgctcatcagggaaaactgaattcccgtgcttcggaagtaatggaatacatcgtacagttcgaggatgtatgcaaatacgccaaagctgttgatccggctgttcgcgaaatctaccgcaaacagttctaaaaatatcggccccttagctcaataggtagagctaatcactcataatggttaggttcccggttcaagtcacgggaggggccaccaaacaaggcaaggcacttagagaagcgggaggaacagaatttgattctgttggttgtaggtgcaaatcctacccttgccaccaatttaatgagggttatatgaaatttcgtgaaactgtgaaataccataacgcggtcgaatatacgcagatttttgttgatatgtctcctgcaaaattcaaagaacgctatggtatgacatttaatgaatggaaagctggattatccgatggggattatcgaaaaaacttcaaattcagtgaatgttatgtagatgatgatccttacgatcaggagattttcggtaaaacaacacctctcattgagaattcaccagaacagctttacgaatcttgtattgattccgcatacgaaatttaaagagatatcatgaaaaatttacaaaaactgtttgaaatgtctccggcaattagaaaaatcatcggagaaaatagcaatccaacgaatcgcaataaaaagttgatggaactttttgtaaaagagttcgatgattttgattctgaacttcataaagcgtttgaggcatattccaaacaagggttctttgcatcaccgcaagtgaatagtaagaaagagtatagcgaacgattctttgattgggagattgtcaatctcgttcgtagaacagatatatctccgagcaatcaccaattgatttctcttgatacttcggtattctttatccagtatcttatcagtggtggtttcaaaaatcctgaaattccgtttacaaatgaagcggttagcagtgaatttgatgaatcatttgtatacatcagcacaaacaaataatcaaatggctatcttcggatagccttatttttggggtgtctatgcgctttttaaagtatgcaagttggatcgtactcgtccctcttgacattattactggagtattagcaattctgtttgccccgtttgttgtgccgttctacaacgagaaaacagggcatcttcctaaaggcttccggtggatggaaaccttcgataaccctattgatggtgatggtggacatatccgccgttgggcgtctatacgctatcatctgggggcttttggggtatacatgcagcgtgttggctggttgtggagaaacaaggcttataacttcgcatatcacgttttaggacgtgaagcgacaagcaaattcaactggaaaggcaacccaaaaacagaaggtgggccaaaccccgtaaatcatggatatctgctcatgtggaatgaatcagcatgggggttgtatgtctataaaccgtggctacggatccacaaggtgcaattctgtttgcgtgtttatgctggatggaagctgaaacaagaagttagcgaccctgttaacctggatcgtgcaatgctggcgtttcatttcaatccattcaggtattatgtaatcaagtaaaggtaatacaatgaaagcatttcaaattttagaaggtttgcatactggtacaatctatctggaagaaggtaacgacgttcggatcgtagtatcaaaaacattaactatggattctgtgatcggtaaagctcgcgttactccgtttgcaaagcgagagatcgagatcgaatatcagccaactgttaaagtggaaggtggacaacatctaaacgttaacgtgttgcgccgcgaaactctcctggatgcggttgaacatcctgaaaaatatccgcagttgacgatccgtgtatctggttatgcagtgcgttttaactcactgactcctgaacagcaacgcgacgttattgcccgtacttttacagagagtctataatggcaatttctgatatcacgggttataaaccccatactgataaaaaagtagaaacagtaaaccgtatcaaagatgctgaaaatgcattaggtgcaatcctggaagatatcgaacagcgactatcaaattcagatattgattcgctgatagaggaagaattagatgaggtgcttgaacgtatccatcaaattcaactggcgaaagaccgactgaaagaagcctctatgtgggcgtgtcgtgcggtgttccagcctgacgaaaaatattaaaaatcaagccgttgccgaaaggtagcggcttttttcgtttttacataaaaagttgttgactctcttctcacattaccttatagttaatcccgtagacaagaaaacacttttatgaggatgacattatgaaacgctcttacaacatgaatgaactggttttcttcaaaactcgtcgtgaagcccgtgcttacgttctggcggctggtaaaaatacttctgctgctatcgatatgggtactgataaagctgttggtgctcgttgggccgctgttatcgttatcgctgctcctgttactccggttaaaactctggtacttggtgcgcgtcacgctgaaactctgaaaaccagcacttatgggacgggtggtgttcataatgttacagtcatcaaaaaacgtagctttggtgcgagggtttaataatgagtacaaaagaattagaacaaaaagtaatggggttcatgagtaacagcgaagatcgctatgcgaaacacctcattgtcgaactgattgccgagctacgccgtcgtgatcgggagatcgaagacctgaaagcagaaaagcgtgtcgttcgtgaagtatatgtagaacgtccagaagaatataactttggccctggtggtgcataatgagttcaatcaacactgaaaaagattttgtgatgtttgtcggagttcagaccgtaaagaaagacatcttcggtaatctgtacctgtcaaacgatgatcgttaccctgcatcattcgataccgaagaggatgcatatatcgcgaagaacaacagcgataacgaagacattcgtaagtatgcgcggctttatagccgtgaagtaacaacgcgcctggagagagcataatgaaacaatattttattgaagcggcagatcgtatcgttctggctctattgaactggaaccgtcgccaggatgtttctatcgtggcatcaaccaacgggacaacatacgaccgttatgatccggcgcgtggactccataaggtgaaagaatgagagaacatgttctgattcttaatgacgcttattttagccgtgatatggtgtatagtctggcgaagtatggtgtgttgttacgttgtgtaagcacaaaggctggcagaaaactcgaagttgttctggaaggtagggcggaagatatcgacagttacatggctcatattgacgcggtaagaactggatattctcactgggataaggtatcattgctatgaaatactacggattcaaaacgagtcattttggtaaagcgtatcgcacagaaaacatcgatcgcaaacgtccgtactatgattcgttagtacgagcgggacgtaaacgcgctcgccaggaagggaagaaagagggtgaagatcgtggataactggaaaacatggatatcaattatcgttggtgttatcatcgggcgcggtttgtatgatttaatcttttcaataggggttaactatggacattggttcgggtagccagtacccatcatgcgcgttaagcaactttgcccctcatccatttacgtttgatggggtagaatgtgcatcaatggagggctttttgcaaagccttaaattcagtaatcccgatatgcaagcccatgtgtgtactctggtaggcaaggccgcaaagttcaaaggcaaaaagaaaaaatggtggactaaccagaccctatactggaaaggtatccctattcatcgttcctctgaggcgtatcaaatcctgattgaaaacgcatataatgcgttattccttaatgaagggtttcgccgtgcgctggcagcaaccggaaaaagtaccttgacacattcaatgggaaagaataaaataaatgaaactgtactgactgaaagagagtttgtacgcaacttaacccgattgagagatctattatgagtgaaaaagaaagagtagaatgtgtgttccttttcaaaggcgcgatcaatccattagcgttactgtatgcgcaacatgcattacgttcaacgttgattcaaagtgtcatctataaagcaggtgtgtattatgttaccatcggcgcaaataacatggttgttattgaatcctacgttaaggaatgtgcatcaaacggcgttgtctttgataaagtcgattttgatgctggggtagatgctgtttatatgtataagggttaatatgagttacgtagtttatttcgattgttcggatctcgatccgttcgtgcttcaacaggcaaagaaatatcatcaagatgttgttggcattggtgtaacaaatgatgatatgctgtgtattgaatttgaatactatcgtaaattcgagcgtgattatttcctgggtgaattgaacgcattcaaaagtacccttttctttgatcgttatgaggttatatcttgaaacctgttattcttaccgatattgacgggatcgccgtaaaatggcaaagcggcctcccgttctttttgtctaagcacaacatgcctactgatattgcattagaaatggttacagatgaaaaatttcgtgatatgaccgaaatcttcggatgtgatcagcagttggctaaaatccttatggaagaatacaataacagttctttcattcgttatctgaatgcgtatgatgatgcattgattgtgatcaaccgtctgaaaacgcagtatgatttcgttgccgttaccgctctgggaacaacaccaacggcaagccttaaccgaattgctaacctgaatactctttttccgtctgcgtttaaagaggtgatggtcgtgggccacggtgaaacaaaaactcatcgttacctggaagctaaagcaaagtatggtaatcgtctggtttgctttgtcgatgatctcgcgataaacttaaacgaatgtcataacgtcattagccagttgccgttattccatatgttacgtggtgaacgtgaagaaacaaatgcacctcatcagttagtaaaatcgtggtttgaaattgaagagaaattaaatgatcttgtcaatccttaatgaacttgcttccactctgaaaactaaagagaaagaagcaattttaaaacgtaacgcagataatgaattgttgaaagaagttttccgcattacgtatacaaaacagattatgttttatgtgcgccagttccctctggtagaagggaaaccaggcacaacaccgctttccgatgcaatcaaagcattgctggaagatttagcaagccggaaatatacaggcaatgcagcgcgtgatcgtttactggatattgtatcatcagtgaacattaacgatcgtgaagtgctacgccgtatcattaaccgcgatctggaatgtggtgctggcacaaccttaccaaatcgggtatggaaaaaacttatacctgaacagcctcaatgcctcgctacgccgtttagtgaaaaggctttacgtcgcatcattttccctgcttactcgcagcttaaagccgatggtgcgcgttgtatggctgatttgttggaagcattaaaccgtaaggtatcgagggcgggtaacgagtacgaagggttaacccaacttgatatcgatctgaaaaagatgcgcgattatctgggatatgatgtagttctggatggagaattgatttatgttccttccggaaccgtaccaacattacctgaacctgaaacagacatgcctttttctttatctgctttcatggacgatgatgataacgacattgcgttatttgcggaagaagttcgcaaagtatcgaccccagaagaagaacaggccgaagcaaaacgcgaagaagggaacgggatcgtaaacaaatctctgaaagggacgatcaccgaagaagaacagcgaaacattgtttatgttgtttgggatattattccatatgaggtgtattacggcgaagctgaaagtgttcagacttatgatgaacggtttagcctgttgcgcgatatcctcctggatctttctctgccttctgttcgtttgattcagtctaagctggtgaataacattgcagaagcgaaacaggactataacaattaccgcaatgacggtaaagaaggttctattctcaaaaacagaaacttcaaatggaaagattcgcgagtagccgatcaggttaagctgaaaaacaaaaccccgattgaattacggatcattgatatctacgcgcacactaaagaagaccataaggtcggcgggtttgttgtggaagatttatccggaatggctcgaacgaataccggatctgggttaactgatacagattatcgttacgatgatgatggcattacccgtgtatacattccattagatgaacgtggtgaactggatcgcgaatacatcatggcgcataaagatgaatacattggggccattgtagaaatggaagttgacggcctccagaagtcgaaaacgcgtaagaaaggggaaccggaatacagtttcttccttcctattatcaagaagataagacgcgataagactgaacccgacgatattcatgttgtctttgcagatctattttaataaaaagcccttgactccggtcgggggctttgttatattagccatatcgaaacgaaacacggagataaacaaaatggctcacatgatgaagaaagcagaattccttaacctggttaaagattgtggatttgctcacttgaaaacttttcgtggtagtgtttacctctatgaccgcgaaatccaggttgcggaagtctattgcgcttctaacatgcaagaatctggtattatctctgcaatgaaccaatcaatcaaataccgtaaatggatgggctgattatgaaagttaacgtttcttatgaatctcgcgttaatggcgcacagtggcggaagctggataacgggcaagtagaaaggcgtttacctggttcagatgagtggatactttcggcagtgttggaaaccgaaatcgatctggcaacaaaagatggtattttgtttgaggtgaagaaatgatcacactcagtgattatcttctgtttactgctttttgggtggcttcgatattcataactgttttgatttacaataaacgggatgattttgggttgttgttattcattcacgggtttcctctttctatgtggatcgtgatgactgctgaaattctccattaatagcactttttgctaaaactatcttgttcttgtttggtatagtgtgctcatcgaaacgaaacagacaaaaggaacatcacatgaacttcatcgatatcaacaaagatttagaaggtaaaaacatcaaactcgttaaccgtgaaatgttagagagtcttggtaatggtggcgaaaaattcagtgaagaattctataacaatttatcgttgatgacggttaagcgcgttgatgttcagggtggttctggttgggtttctgcaattccggtttccctggtagatcaagcaacatatgacccagttgccgattcatgggatctagaaatgccgttggtattcgaagaagtcatgaagtgttacgaaattgcataggtgagaaaatgaaatttgaagaagaagaagtgaaagaacgattatcaaccgcgcggcgattccttgaatcgattgatttcgataaactcggtaaatgtccggatacaatttgccttaattgtgggcgttctgttcttgttggtaagtgttgcgataatccaaatatcgttgtgatggaaaaggaacaagtatcccccgaaacatgggatcagattcaggaaatcattaaaaacccgccagcgccaactaaaaaattacgtgaattgatgacaaggaaaatgaaatgagcaaatttaaactgagtgcaaccgttcgtcttattcgctggaatggtgaagagatccgttatgatgaccctgaattcgctcatgaaatgctttcgcatcgtttggggttgaaaaatgcgtcactagttcaaaccgtgaaaacatcagcggatccggaaatctggcgttgtgtgatcctggatctcgatagcagtattgactatgatgatcccgctaactatccgcttctggaagcacaagttgataatgctccagaagacagacagtgttttttggttgagttaccgcgcgaacattacgaaaacatcgtaaaggcccgtagaaaggccaataacaatgttttcgatctccacctcggattgtttgaggattaagtactgctagttgtgttcgtagtagcggcgctggtaggttcccccacctgtatacattcaagtgtttgcaggtggaaatcttttgatacgtctcgaacacattcaacgatcagatattttcctgcatattcttccccaaatacctcaatgattgttcctaccttaacatctaaacgaccctgctttatatcgaatcggatccggcgttcatagctggatagcaattgcattttagaagcctggaaaggtttaccttctgaatctgggttctgaaagttggtatcatagattgcattacggtttgtgaagatccatgtattctctgtgtctgtatcagccagtatatcaccgtacatctttttatcagtcaatgacagactaaagaaactagcgtctttaaacagcgttgtgttatccttatgggtaatatactgggcttctgtgaatatgacagtatcaccaacaaacacgttatcaacgttaaatttgtatgccgggatcggtgtctgggccagaatgtcagttgaacttttaaggaaaataccggaaccatcttcccacagataacagaagtcagaagaaactacactttgcccgttgtccctgatataatcaaatatatcctgatatgtaccatttagacatccaggagggatacgtatgttaccgccgtcaacttcgggggtaagcagtttcattttgctatacagtgccgtcatacactctgtaatcgtctgtacggcgttattgctaaatgaacgggcaaacttacgtctgaacgttttatgcagcggagagaggttcatacgcagcacagaacggtttttatcgtcagtatctacgttagagtaaagcaatccgtaatagtgttgttcctgtgtaccgttatactggaaagatacctgtatgatcggctggataagttgctgatagattaactgtgcatcgtatatctgcatcagtgtttcagaagatccattaatcatcgtcttttcactaaacgagacaagagcgggtaacaattcagtgtatgtattgtcaatatatttttcgtatgatgtatataatttaatcgacgtgactcgattgacgattttttcagccataaaaatccctcctaatatatcctatttactaaatagtaaataatgacccaggttcaatttgaggcaataatgaaaaataaaactcttgataaatttatgactacacggcttgaaatcaagaagacaaacgttaaaaccgttcatcttccggatggaacagccattgagatccctaagatgtcgtatcgtcattttgtaaagattaagactctgaaagatgacccagttgcgatcatgcgcttcatcattgatgacatcaaaccgcgtgaactgacagcagcggaaattgaatttgtgttgatccatatgtatgcacacaataacgctgattatgccaatacgcttaaagaaattgggctaaatcttgatgacctcaaaatctccgaaccttgctatgattttacgtttaacaatgtgcggttagtctttgacaaacccagcctgttaaatgctcaccttcctttcctcatcaaagaggcatatgttgacggtaagccagtagaattaactgaggataaacgagacgaattaattaattgcctgtaccgattcgaatatgatcaggtatcgcgtggtgtcctccaggaagtatacattattcatgaggggaaaaccatcaaagggcttaacatcattggtgaatgataatggctaactcttatttcaacgaagaacaaaagaaaaagtttctgaacagaaacagcaccagacaaccagcggtcaccaaagtaacagcctcccttgatgctgaaagcgcccgtgacctaaaggaaatcaacgataacacccttgaaagtgcaatcaatacgcttgatatcaaagaagggttgaaatcgtttgaagaaaaattccgtgacaaattcgcgggattcaaagaacaatacgaagaggataaaaaggaatctttagccgaacagctacctgatttcgtcggcccgatccgtcctatatccttaaccgatgataactcaaaaactgttgacaatacagtaaacgttaaccaaaatggtcagttcggtaagctggaagaaaacactgaatcaatttttcatgctatcaataaacttgttgatttgtatgaaaatactgataaacataaaccgcttcctgaaccagtggaagaacctgatccgtatgtagacactaagaaaaaacgcatcattgatgatgaagacaagagaagcaaaactctggatagtattgctaaaagtctggtttctattaaagggtttacatcgcagatccttagccgtttcattggctactctctggaagcaatggcaaaatttgctaaatggacgctccttattggttcgttaatctttacattcgatgtgttgcgcgtcacaatacgcaaatggtttgaagatatcctgaaagaaggggaatcctcaaaaaaactatttggtacatatctgggtaacgtaaaggcgatcgtaacaaagattgaagaaggtttgaacaacttcaatatgaacaacttaggcgaatcacttcgtgatttgttcgttgagcctatgaagctgttagggcaaactgtacaaactgcgatcactgagggtatcggtcgtcttattcaatcattgggggaatcaactggtatcgacagcattaccaatgctggacgcggaatgcagatcaccgctttacgtgataaacagaaatttggtcttgagttgtccaaagatgacattatcatgatcaagaaacaagaactggcagagcaacaggaagcattggaaaaagaagataaagccattgcagcacgtcaggcattgactattacccctagtcagatccctaacggttcaatctacaaagttgctcctactgattatcaggaaagaaatcagaagattgtcgatgctgataaagaacgtctggatactatgaaaaaacacaccgacgaattaaaaagtcaggtgaaattgattgaaggcagtgcagaagaagcacagaagttagccgatgaggaaaacaaacgcaacagagagcgtgttcgtcaggcacaaatcgaagcggatcgcctgaaacaagcgcgtaaggaaggcaaacaaccgccagaaggatccgagaaaaaaggcgatgacctgttgggtaaagcaaccaattacgccaatgctgaaaatattgatgccgatgatatcaaagacattaacaatatgttggaacagcttgaaaaacgtcgtaatgaaggcaatctggacgatgtacagaaagatagaatctctgatcttatcgaacaattgcaaaacaagattgcagcccgtacagaatccagcgccccgatcgacgcacagccaccgttagcagcaaataaaccggatgctgataaagcaagcaacattcaggttaacaacaaaactgttaacaacaacgtaactcattcagtacaacgcacagagcataaaccgctcgtagcgctggcataaggaacatataatgaagttttctattattgatgacagtataaacactctcaaaaatattaaaaatcgcggtatcccctctgggggtgccgctatcacagaatcagtattaaagcaaactatcgttaccgccgaatttccggcccaacgtgcagcaggtatcgataacgcttataatgcttcaagtctgtataataacggccttctgttcactgcatatgattttaatggtgttggtagtaaagacaactatcgttcattacgtcaggcagcacagaacccaaaacaaatactatcatctgcgacgggtaatgttaagtacaaacaagtgttgaatagttctattggtactatggaacctgtttgccagatcctgctaccgcgaagcctgaacgataacgaagtaaacagccaccgctatcaagatgcaaacgatagtttcttaaccaaagggttgagccgtgttgtttcaaacatggtatggggcgctgtagaatccgtttcaggcggtattatggcagaccgaagagaagcccttgatgttggtactaaagccgctttccagggttctgacaagcgaacaaagatgtattacaatacattcgtgattgaaagccgtaatgatttgctggaactgattaaaatctactatctgtttactgttctgggatacggtacaacttctggcggtactgctaaagaagttgctgcattggttaaacagtattacggtgttctgggtgctaaaaccgctaacgcaattagcccttccagtaacccagtaacagcgtcagattttgataatagtctgggtaatgacgtggttgatttcatttcaaacgtagaggttattaaatcgcctcctgtctggtttattcgtgatttccagtctggggattccttgcgtttacctcattcaacctttgggccagcaggtattaccagtgttcgctttggtcgttctattgataatattgtaaatacattaagagaatcaccaaataccccgatctcacttgaggtcgaaattcaatttatggaactgatcgatatgcgtcaggattctatttttgatacaaattactaaggagatatgatgttttacaacgtagatgaatttttatcaggtatggctaatcgcgattttcagcgtagcaacctgtttagcgttgtatttgcaaccagccctgcatcacgtatccttgacaacacgatcggtagtattcgagatactttgattgatggatctattagttctatcaacgcaaacaacccgaacgaattcattaatgctatcactggcggtgtgagtaaattgtttagttacaccgtcgataaggcgattatgtcgctgaacaaaacaggatttagcaaaatcatcggggcaattagcccccgtttgattacttccctgtttggtgatagcatgtatggacaactgctatctgaattccgtgatgaaatgatgtataatatgggtttaagcattatgggagttaacctccctggtaaatccattgggtacgaatacgtttataatggtggcgtacctcaaatcagattcactcgccctgagaatggggaattgtcattgacgttccgcaccgattcagaagcccgtaacctgaaaatctttaacgaatggatttccgctattcgcgatgatgtaacaggacaatacgccttcattgatgaagtgacaagtactattcaggttaacttacacgatcgtgatggttcaccgcatacaacatacgtatttcagaagtgcttgcccgtcaaaatcagtaacagtgaattgagctatgagaacaacaacgaaatctggacatttactgttgattttgcctataaaacatcatgggttgttgaggctgataaagaaggctgggaagggttcaaacaatccgtagaggaaggtttagccattgcagcacgtaccgcaattacaggacaataaaggggctacggccccttttgaggatcttatgtttgatattattcgagtaacattaccatcagggatcaaacgattccctatgtttacagttaaagaccagtttaaattaatgctgacccgtattgatatggaaggtcggccccttaaagagcaacaggaaatactggatgaagtgctggatctgctttatcctgggtattccaaaacagaacaggaatacattttcagccgggtgtattgtggttcgttcggtaaaaacgttatcaaggttgtgataggcggtaaaggtgggggccactccgaagccttcatggtgattaatgatattcaactagaaaatgaatacaagttgaatgatgaaatcacattagggtttaacttcccccgtacacgcaatacaagcgaagagttgtttcttgaatgtatcagttatgtaatatacaacgaacagcgctatgaatggacatcactaaccgaagaaacgaaagagaatattcttgatatcgtcgaacttgatgatgtcgaaaaaatcgttactatgctaacgaaatcggttgatgtgtctatgcgcggtaaatcatttagtggtatgttaaccctgttcaagatattgtttagtcgtggggatctggatgaatttgtgaagaccaactatctgctaaataaaaacggcctgaacctagaacctatcatgaatagtagcccgatggaaaggcaaatttatactgcattgcttgcagaagacttgaaaaaacaaggtgctgttaaatgagaaagcatgaatataaacacgttgagaaatataatgttgattatcgtcctctgacacatacagagtttacccccaatgcagattttatcaaaggggatgtttacctgtatcaaagagaatatcttttcattctggcacttctggaaagtaaaaatatcgatacccgtcaactgttcatcaactgtgaagaatgtcaggaaagaatagaattccagcttaaacgcaatcaaataatggttgaagatttcgacgataagctatacggcaatgacgggatcgcgttatctgttcaccctcgtaagactggtgatgaagagatccccgatcttatcgattacgtaatgatagacggcgaacagatcatgtggagtgattgcagcgacaaagataaagaaatggtattggatgcaatcgactatgcaacctataaatcgatttctaccgccctggataagccagcagtggtcgcaaacattccggtaaggtgttcgtgtgggcatagccatatcgtctctctgagaggcttacagcaatttttaaaggtggtctaaatgggtgtaaatctgaggttgctatatagcgatatagaacctaacatgcaacgagattggaataatgacgtagcggcttcaaaaggggccgcagcagtaagaaatagtttgattggtatcgtaaccacgatcaagggtacacgtccatttgatagtaactttggttgtgctattagtgatatgctgtttgagaacatgaaccctcttacagcggaatctatcagaacatccgttgtgtctgctatccggacatatgaaccgagagtatataatctttctgtcgaggttatacctctatatgacgataacgcggttactgtgactatctattacagtattatcgacgatccggatgatgtagaacaaatcaaactccaactttccgcctcataacaaaaagccccttcctttcggttggggctttcttttagaattcaatgaatcccattagttcttgatatcgcaattcaaacggggagatataactttgcatctggttttgatcggatacgatgtaataatacacctcatcattatcatcatatagcgcttctttgatgatgcaatagcgatcggtttccacgttcacataaagagtatccatgtactttgtaactttggaaccctgtgaactgatttcacgaatagcgttatctatgaaaagcgacaatgcttgcatgaagttatcaaactcaccatattcacagcccataatagaaattgcagtgtattggtgccagcctttgattgtgtctccacggcggatccatccaatttgtctacccccgatagatacacaccacactttaccaacgggactataaaaccgcacaacttcttttaataacagggacatgaccccacattttgtataaggactcatttcaacctcatttcatatcaagtagccaggaagggctagtttcaagcgaaatcgcagtatattcatattttacagtataacctttgaaaccgaaaggaataattgcattttcattgagatattttactttatgctttgcttcttcttcattcagagcagcacagactgttgtttgttcaacgttaccaacaggagaagtaaatttttcaatgatgatgtatacgcagttcatatcgtttccttatttcagtttctttccggttttgagttcatattctaactcacgaacttttattcgtaaagtcattaaacacacctgattctgactgtaaaggtattgggttataactttggttttaaacttctcatcgacttcggaatctttgagccaatcagacatcatctgatacgtagggaggtgttcgcacttctcatcgtctgacatcgcatcatacgttgctttgtccatcgggggcggttcctcgaacgcgagagcgggggttgcgagaagactcagtgcaagtagtaaatatttcataacgtattcctcattgttttcgatagaaccaatatagcaaaaagccccgaccgaagtcaagggctttttcatcaatgcaagaaagatttcacgtactgttcgatcttttcacgacatgtatcaactgaggtgctttccgcaattacggcatgacataacgcctcgccgccgacccagaaactcatcatgtactgaatatcacgaccttccatttctttttgatgcgctttgattcgttcgaaagcattttcgattgtttcagtagcagtaagcatttcggattccccgtcaacctccgccagttccccatcgatcatttcgctttcgacttcttcccagtatactatcgttatcatgcattaccccagtggttaaccgtcgtaatccccgccacaattcacatcgccttcaatgaacagttcgcggttatcacgtaataaattatactttctttcgagttcaggcccgaacgcgtcggcgtcttcataccagctataattgtatcttccgtattcatgatcatattctggttcatcgccgcgttcattgaagtgaacaattttgatatcgtccatccccagttctttcaacttatcccagatatacgaaatctcaacgctatgggaaccgaatgcttccagtgagatcgtaccgtcgctatcgacttgaggaataccccacttcgaacgagtatcatcggtgatcatatctattaatgactcgatattattctcaccgtagatatcagcaacttccttttctttaccagggcgaacaagtccgatcccgataataaagctactgcttgagctattgctcacaaacccagaacgaattttcatcgcatcaccatattaccaatcatgaatagagggattagcgcgaagacgataccccatagaatgaccttatcttcacgacggtcgcacccatgatagataacacctccagcgaaaaccaatacaacaactgaaacgaacgcgaataaagaaatcatttgcgggtatccattttcattgaaacttctttcaggatcttattcagatcgtgaagcgcatcttttacgttaccttcattataggtaagcatatcctggtacagtcctttcaagcaacgattgataacatatgctttttcggaaggtaacattgtcccagagcgattataatctctgaaaatgtccatcatcgtgccgttgttgccaggtaatgacgggttgaagttaaccataccagacatcaaactatcaacatacacaacggttgtgttatcagaacgatacgcgccaccaactttaaaccagttgctgaacacatacggagattcccgcacttcgctcaaatcggttccgatttcatcgatgtttacacgaatgttgttaaaatacaccgattcatcaatagaaccaggacgccatacgatagcaccgttgttatttttgaatccgactacatcaacctgccagccgttatctgttaaccggacatcatcaacgacgatgaaatcaggtagctgtgaatgaaagccgatgttttcaggacgggaattacgaaacccatcacgattggagaaataaaggatgtcaccttgattcagttcgcatatattcataagatttttaaagtccaattcaagtaattccacaagtcacctcaaagccccctttcgggggcgagatctcattagagtttaacttctttttcttccagaacgattgtgcaatcaaatttcacatctttccagaattccgctgcaacgatatctgttgcggtaacgcttacgctggtttcttcaaaatccagatccgcaaaccatgcgtgtccgacgacaataccgtacattacacgactcaggcgattattaagggcgcgaacctctttaatagtttcctttgtctgcttatcaagatactcgatcaggtcattcttgtcaagcgcttcgatctctttagatacagtatcataagcccacagaatgatcaggtcgccattgttaagtttcttcttaccttcggcgcgttttgcaacggtagcagcaacagccggaagtgatgaaacgcctttgattttcacgttcagttctttcgacatgtaaacatcagtcgattctgtgcgctcaaccttcggagaaaagccgtaatcacggatcccttgctcagacaaccattcaccagccgcctcaccaaagcgctgtttaagcccttctgcgttgcgtaaaccaatcgcgttatcacggaagaacttcattaccttctgacggcctttcaggatttccagacggacgttatcagcaacaaattccttaccagaaataccgcgagtcatcgaacggttaaccagaggcagagaggtaaagtcaaccagtacagacatacggtcttcaccaattttagccagcggcttgatagtcagaccagaagcacgtaagtttttcagagtcgggatatcggtttccagcggaagtaccttaacgttcacgataccatctttaacaatggtaaagttacgcacttgtttggtttctactttttccggcaatccaaactctttttgtttgctttccggaatggttacgtaaccttgcagatccgtattgatagaaatgttcggacgggaactgttacccaccaggtgtttcactgcaactttcgttgtagtttgggtaaattccggtttccatacttcgtgcgctaccagttgagccgccagtgcttttcgttcttccggagtagaagcatttgcaatctgttctgacagtttatccagtgtatcatcatctttctggacagtctgacggcctgtgcgattgtacgcccaatgttcagaagacaggtcgatcactgtgtcggtttctgccagcagttcgagagcatcaaccagagtaaacgcgttttcatcaggaaccatgttgtaatcaacaccatccatcagacgtttagccggatcaacaaccgcttcggagatcatatctttagcgttggaataatcctgtttggtaaagcagttatcgtatgctttaatcaggcgcacatcacccagctttttcagaactttccatgccagatctggattcatggtatgaagcgcatgatacagaaccacatacagaacctgttcaccttctgctgttgccggatcgaagccgtcaacgtcattgatcgcgttttcacccagcgcccaaatgtttttgatatgttccggaaccagaacaacaccatttgcagcattcaggacatacacacggccttcatccaggtagatcgcatgggttgcatcgccaactttgacttcaacacgtgcggaggtttgcgcggtaatgatttcatcaaatgcaggtacatatgcatcaaacccttcaacgaatttgtgtaatgcgttggttgcttctgccattttttccagcagaggacggtttacataataaccatattccaggaaagcaatgttgttaaacgtcaacggcagagtagaacacgctttcaggatatcatcagtacgccagcagttatcataaccatcagtcaggaagatcagactgttcagattaccattatccgcttgcagatcggtagcgacttcaaccgccagttgcagaggttcaacgaagccagtacatccggtcggacgcagataacgatcgatagcatcattgattttgctcaggtcggatacagagctaaccttttcgcccacgaatacagaaccgaactgaccacggctggagaaatacagaatagatacggtatcatcctgtttaaccagcgttgccaggttgtttttcaggtgctgacgaatgcgcgggagttcgttatacatcgatccggatacgtcacaaacaaaaacgtggttagtcggggttggtttggctacggcgtttttgaattcaatgttagtgatcataattttctcatttataggtaaatttgattaaaatttcgtttacttttttgctaataatatctaatgcatcatcgcatccaaacttactactcaacaatgaaacaaaatcatccatcgttgttgtttgagactcgccaacgtcaaaagacagagcgtaggcaacaggatttttaatccttacgatttgaatagtatactcattcagatcaaaccgttcaagatattttcgcaaagaaaataaatcaattggtactggtagagtttgactaaaagttatttcttcccccagttgataggggggcatttttacacagatttcgtattccatcagtgatgactcttcatagtgtgttccagattacggaaaatttgcccgtgttcaagctgggattgaaattctccgcattcatcagagtaagtaaattcataaatgaatacaccgttctgattaccaaagttagcgttgtattcttcatacagccacattttgatcaaagcgtctttctcttctgtttccagatcataccagtcacgcccatcataagcaagcgcaatttgaggattagaccgatatcgagtttcggcgctatcttcggtttcccattcataacgcttatcatcatagtatgattcgaagctatttcccatatgaccacccaggtcgcggtgtacttgctgtacaacttcttccgctgtcgggcaagtcatccagctataaccacagttaggaacacaatcacccatcatttcgcggagattgttgatatcagtcggatccttcgggaaccgtacaataaagctacttgatgaactattgctcacaaaaccagaacggattttcatttgatttcctcaaattcaaaagcggtgaaatgttttctttcgtcatacccaacagtacaacgatgcgtttgctttccggtaaacccgtcaaacacagttacacaatagtaatgcaacgacggaagcggtgtatgtttaatgtatttgatcgcgacgttcaggtcaacagtagaacatacacaatcacacgtttgctcaaaacggtcatcaaaaatcaactcaatgctatagatgttcatttttcacttccttcatgtttttcataacttcttcaaaagttacagggatctcgttgtactgttgcgattcttcatcccatacatcacgatgcccgaatgttgaactttttgcaatgattttttcattttcccatacatcaatagtaacatgatcaccaagataagggaaattaggaactttgttcagcgcatcaacgcagttttgcaatgattcagaaacatgggcaatttcagtgaattcataatcagcactataagaagctacgtaaatcatcaccaccccctaacgatgctaaccagcagtaaacccaggatccagaacacagcaaccgcacaaatacgggccattactacatttccgcgactagtccactccgcactaaggaacaagagaacaaacgttaacgcgtataaaaccatttcaataacttcggtaatcatataaacctcacgaaaaagcccctttcggggctttattaatcaatgtccgaacacaccacgaatagactctgcgaatgcatacagttcagggtttttagctttcactgtttcgatttgctccagaatataatctggtttatatttcgcaccgaaccagcagtaagagaaagaacgatcccacatgaacacgttatagtattcaccgttgcgaacttcaaccatcacataaccaggattagaacccagcggataatctttcagaagattgaatttcgcgccagcaccagtacatccgttaaacaggtcattaaaagtcatggtatattccttttgtcagtttcgtttcaacaaggacactatactattattctttagcctgtgcaagcgcttttttgatttgttttgcgattgcttcgatcaccggaacagatacagagttacccgcttgtttgtacgcctgtgttttgctcttatgcatcttgaatgaatccggaaatccttgcaaccggaaacactcgcgaggtgataacattcgagggttcttaccttcctgtaataccagacattgaacaccatccttatagtattgggctgttatcgtcccagtacacacagaatcaactgtaacggcctgatagccaaaccccttgccgtttgccttgtttcgctctttacgctctctaaagcccttccaggcacgatctgatatggtgtattgatcattatccggttcgagaatgtcacctacccttgttggggtacgtggaggaacaggaaaactaaagaataccggatcgcgaaagcagacaataaacacacgctctcttcgttgaggcaatccaaagtcttttgtattcattacctgataatggatatcgtatccttcgtcctgtaacagcctgtagatggttttaaacgtgttgcccttgtcatgggttaatagctggggaacattctcaaagaacagcacagagggctttttagcccgtataatgcggagtatttcaaagatgatagtaccgcgaggatctaacatgccctgttttaaccctgctttactgaacgcctgacaaggaaaccccgccagcagaatatcatgatccggtactttgttttcatcaatggcgaatatatcaccctgaatattttcatcaccccagttatcagcatatgtttgttgtgcatgtttatcgatttcagacgttaaaaggcattcgaccccgccgaatgccttatcgaaaccgagcctcacgccaccaacaccagcgcaaaggtcaattattttcatacgtcgaaatcaacctcatcgattttgtatgattcttcgccaatatcagcccatagctgaatattcacactttttgcatcacgataaagagattgaccacaaagcccacctgtataacaagtttctgtaatctcgttaacttccaggcggaggctattgcgcataattttaacaacagccttttccattgccgaatctagggttttagtatcacccaatactacatctttaacgttcaaaataacatcactcattatcgccactccgtttcaattccgtgtttgtatgcgtcaacgcccagaggggtgatcactaaacacatatcagtatttttcgttggtgaactaaacgccattgatgcgtaacctttttgaatcagggaatcacgccctgatttactgggaacatcgttgaaatctaaatccaacatttttgacgagtatccgtaaagtttacacagaacatcaatttcagcgccagataatttcggatatgtcatttatagtacctcacaacatgttcagaatacacacgttcaatgaaatcattccagaaatcgcgatcaacttctttcggataaccagatacagccgccagcttttcaacttcacacatcgttgattctagcgcctcttgtacggttgcgaaaggaacaccgccagctttaaccattttcaaaaatgcactatccggaagaggatatacaatatcaccttctttgaaaatctggatcaattgcataccaccgcgcaacgcatgagaaagagctttccagtcgatcccgttgttggcttctgcttgccgtgctcgttccccgtattcatcccagagtttatacacggattttttcatttccgctacggtgatcgtagactggaatttacgccccagaacttcataaaattcctgacaacctgatttcagtgttttgtctgtaacgaatcgacaaaactcgttggtcgggaatcggttagaaatctcaccaactttgatgcgcttgccgtaattagattcatccacgttacccagcaatgatgtaccataccagtaatcgggaatcatttgtaacacatcaacaacttcacgcagtgccgccaggcgagaacctttaacaccatacttcgccgcttgcttacgaacataaccaaacaggccagttaattccgtagtgtagaagcgcgaacggttagcgcggagatattgccagatatcagagttagcgatcagcttgctatcatctgcatgaagcatatcaatcgccacggtatcaccatcacatgcgaggctaataaacttttgcagactgtaaatctgacgatctacgtcattaacatcgttctttgagtttttatcaccagttgatgtatcgatagacttcttcgcagtgcctaacaggatttcgcgaggatgagggagatagatccctttgtagtctttatcgcttgttggtgtttccagtccgtacaggtgagaaccgaatacggtttccataatcattttcatcagaattcaacctttaatgtttttgcgatcccgcgcaattcagcggtagtaatatccggaatgtttgttccgtagctattcccaaatacttttttaatcttatcacacaaatcgcggcgatacaccatttctttgtattcttcttcgctacgatacagttgataacccatccacccctcagcccatccggaattgcgcttgattttaatattagtacaacaatcagacccatcttccggtcggaaagatgcatacaggtactgacgcgcaactttttgtacgtaaagggttttggggttgcgattttgtcgctggtcactacggatcccagcatcatacaacgtatcaccaactttcacatcacttaaatcaatcatttacgtctccagcaattagttttttcacagtaatgaacgggaacaggcacacccaacgtttctttactgcttctgttgtatgttatcacaacgaatcggttttcgccacccctaacacactccagatccaaaatctcgcgggttcccttcgtgttaatgtctgcaacataatattcttcgttgttgacaatcactatatccgacataatcaagcgaggtttcatgcagcgtacacctctgattcatcgacccattccagatcctgattgagtgattcaatcagctttttatcgcgtcgggaaatgacaacggtagaacctttgtcagctttcacgatgatgtcaccagaagaggtgatgtattcaaccacataatcacggcgagggcttccgagtctgtcaccaactttaacagcacgtctaaccgattcatgagatttttcggtgaacactaatccatcacctacatgggtaacaataccatcaacagcagaacgagaattaacataaattttgctaatctccgccatgaaaacactatctctcagatatcgagcagtcactttatctaaacactgagaagatactttatctccgccaggatatactgagataatcattacatgaccctgaacacgggcggttcctactttatgcagaatgtaaaccattgaaccatcagaatctttagatacaaggatcacgctgaaagattctttgtgttgcttctgagtttctccacaggtaaaactcacgtccagaaaatcaccaactttaacagcacggggttttgctacttgttcacgagcactaataacagggatcataatcatttcctcacagtttcaaattcttcatcagatttccaatatacgttaaaattacgacaatcgtgttcggatgtcaacgtatatttttcatttgttttctcatcggtgataaccatagtttcattatcgattgagttaacaccgtaaacgaaaacattctcaccgcgtttgtttaaaaacgcatcacccttttcaatcaactgccaacaggcaacaggcaacccacctggacaaatcggacgggtaacaagacaatagggatgtttcataataagcctcttttgtttctgtaggcccaatatagcaaaagcccctgacctaagtcaagggctttgttttaaattccggtaaatgctacgatgatttgataatggtcatcgaagaatagatcccgcatcgcgatcacttcgtgcatcggtagccagaacgcgtctgctgcatcatcagagccgcccataatacgaggtaatgaaccatcgttattaggttcgagcttgatatattgtgctacagtcggttttgagaagtacaccgaacgtttcggatgatcaaacagcatcgaattacggatagaaccacgaataaccttttctggtactttaattcgtacttcttccagcaattcacggatcgcacaatcaaggaacgtttcgttaccgtttttgtgtccacccggaagcgctaacgcatctttaccaggcgcaaacttacgacggattactaacacgtggttattacatacgaccactgagtcagccgtgcaacagttcagagaatccggatacggatattttttgaacttgtcaatctctcgttgccagtgtgcatcttcatgggacaaacgctggaattcttttgtttgtgtccattcatcgataaaggaaaccgtagtgctaggcgcatattttaacaaatcttcgtcccagccttcatgatgttcccagataattttgcgtaaattggtcgaggacagatcctgatctccaaccttcacaggttcaaccggaatatgattccatccgaatgctttaagccagtaagaatctttgtctttttcgtacccgacgatcgcaattcgatcatttcgagtttcatcgattgccatacgaacacgggatttccatttttcctcgttatagaggtaatccggaatgtacgcgaatttgattctggctgcatctccaacatcaagtttgcagatagaccagcgagtgatcattgcttgacgctgtttagcggtcaatgggtttaatgtgttcggatatgcataagcagaaccgatcagaatgtaaaccgtatcagcaacagcaagggcttcccttaccattttctcatgaccatagtgaaaaggttgaaaacgtccaattactacagctttatcatatttgtgtttcataacgtgctccacgtttaaaggttaatcataaaacagacgcaattatcaacacaccaaacaatccaccaatgaaaccaaagaatagcgaaatgattgtagtcagtacgatctgttttatgttcattatagtattctcgttttagatgtcaagcccccaaagagggggctttaaaacattatttacgagaatcaaaaatcactttaccagcataatccgaacccattacagtttgaggtacgccacctttatagcgggtagagtagttcatctgtacatccagttctttccagcggatcatttccggtgtaatggtgcgttgcagggcggcgttggcttctgcttctttcttcgctgcatacagacgggcatcagcatcacgttcgttagcgattgcggcattttcacgggcctggcgatcagcttccgcttgttttactgcttgcaatgaagtctgttctactttttgtagttcagctttagcagcgttaacctgttcttcgcggatcttcgtgttagttacctgttccatgataacttccggtagggtgatatcctgcaagaatacctgtttcacagtgtaaccgtaaggccgtgcataatcttctacttcctgctgaatcgcaatttgcagttggttttggatcttcgcatcaaacaggtcttgcgcttttggtacggatttaccaaattcgcgaacagtggaaagcagtttttcggttacatacttatccagtgcctgatcctgattacccgcgttgatacggttgatcggtgctttgctaccgtcgaattgcagcattacggtcatatccacagtggatttaaatttatcctgggacggaacctgtaatttgtcgaacttcatcgcgatgtctttggtactgaacgtatcaaacgttgccagcgggtttacaatgtggaaaccgggcagtacgggtttcggtgatactttacccatgaaggtttcagttttaaccgtaccgtcttgcacaatggtatacatgttaggcactaaccacagtgctgcgactacgcccagagcgatcagagaggttttcttcgggttgttcacgatagtgtttaagttcatcataatttccataagttgttgttcaattcgatagttattctatcatcacatttcacgctgtcaaactatttttaagaaagttttgtcagcttgtagattgtttgatagcacaagcccttaatctcgtccaggatgttcttcaaagaactatctactgattcgtagatctcgtttgcttcgttggctattttacggagatacgccaccgtgtcaagcacattttcggtttttagcacaggtttgtatcttcccgtgattcctatgtggatttcggtgaatttatcaaccaaatcctgcatatcttcgtaaaaaccctcatatgctttatgttgtgagtatgaacctgttgcaaaatgtgcgctatgcatataggtaacggacataaggcacatgccaataaaggcatctatcttgcttgagttctcagattctgtaatttgtttaaatgattgcatgatgatccctttatgaacgatggatacttgcaaactcatacgcgaccctaatccctagctttgcgcattcggattcagatcggcattgtttttggtgccattttcgttccatgtagttgtagaatagttcgcttgtatttacgctgggagggatcgttgtgatgtatacttgaagggccgcattgatataatcgtcaaattctttctgaaccggacggtcggcggcgtgtgttgtgggtgtcatcatcaacaatccgaacagcacagccattgatatgcgtttaatgttcataacaattactcttttactcatagacccactataggtctactcctgtatatatttatagcaaaaacgaggccgaagcctcgttataatatttttgctgtaaagtcaatcaagtaatgtcataccaacacaaacttctttcgaaagcgcgtattttgttcacgttttctacgttttcgtcccaaccgatcacaccagctttcatacgtttcagttcctgacgtaaacgggtacgtacttttgaatcaattttctttactgcaatagaaagcattgcattcagatcgccatgagctttgttaccgtcgcgacacagattattatcaaatcgaatgtatgcacatcctgatttgtgtttccagttggttgagtaccaacgcaacccatccggatcaataccatgttgagcataataacgagaatactcttttacttcttcgatcttttcgttagatgaacggtcacgaagaggattgtatttcttacggtaagtgcgactcataatgatctccttttgttttatgcttccactgtatcagggttgttctttagttgcaagtaatgttttcgacaaagtgaaacatatttgtcttcggccccgatctcaatctggtcgccattagcaacaaatttgccatttgcatcaatacgggcaacggtagttgctttctttccacaatgacaaaccccccgcaactccctgatctcatcagcaagtgccagcaacatataagaaccttcaaacaggttcaactgaaaatcggttcttagtccatatgtcattacgggtatatctaattcgtcaacaacccgacacagatccatgacatttttcctggaaaggaattgtgcttcgtccacaaacacacaagaaactagtttctggctgtcgctataaaaatgattgttgtgaacatcataatataagtccatatcaggtgtgatcatggtacatgttgcttccaacccaatacgcgaagagatactctgtttaccttctcgcgtatcaattgctggtttgtacatcaggatccgcataccgcgttcctggtagttgtatgcatcggtgagtaaacgagcactcttgccagcattcattgatgcataatgaaaatatagtttagccatttatcctctcaacaaaatctggggtattttggaatttcccttccccttcatggtttttgcatgttttatttgaacagtagatccaccaatcccactcatcataagggggtttggtaatgttcattacacaaattaaagggaaatgacaatcccgacagcgaacattttctataatgtttgcgttagccatgtgtataaccgcccatttcgctatcttgtgcttgatgaatatcaagataccacatattgattttgcttttcagttcgtccatttccttactcagacaattgtcaacgatacatagaacattaacagtttctttacgttgcataacgtcgatgttattcgctttcatcgcttgcgccaatgcattacaggttttaaccagtgcggcgcgttgtcctttgattacggcgatccgtttgttcgctttcttaatctcccgacctgctttgataggatccatcatgattaattcgccttacgaggatcgaaatgaacgacaatgatcgggtaatcgccagtcacctcattaataatgcgcttaatgagttcccagtctcccccagcgaggccagcaccgattaaaggtgtgatgataggctttccagtcttaacggcgtcagcaagccctacagcctgtttaaaagcattgccgattgcgtcataatcgacacgcggcccaggtgtccagaaatcatattgagtatatgcattgaaaacaatgttgcctttttcgccaatgtaaacagaacaagttccgagcttatcacgggaaccttttaacgtattggcatcaacttgaaatgcaccaggaatacgatcgcggatttcgcgagcaataccagcgcccatattgcaatagcagttgcatccgtggatcaaatggccttcaccattcagatacatattgacagcattacctttcacttctttaatgatcatttttattattcctatataattcacgttcaattagcatatcgatgaaatcagtaatatcatcaaaccaatccttagtttcttgagcatgagccaaatcaccatcatctaaaaacttttcgcgagcatcagcaaacttatctaactttttatagagttttgctttgtctatatcattcataaattaaccttaattattaaaagaacgtaagaaaaatacgtaatgtcaaacctgtttacctttccgttcacggcggcgatcttcttgatgacacatatataaaacaccaccaaaaattataaaaccgataacaacgcctataaagtatccagcactaaacatagtcatcatccccgcaatagtaacaaggcccagtgctctcatgcttaccagcattgtacgccaaaaacaccacaaccgccgccataataataaaaatccagatagccattagtaaagccctatgccagcattaaattcatcaaccaaataagtacggaacttttcacaccgttccttatttggcgcttgtttgcatagattcatcattggttcagactgcaaaaactctttttgtttcagcaacttaccgcgtttatacaggtgagcattttcctctccccacatataagcaacatctaactgttctgcgatcacttgcttacataccgcgacatctttgatatcacgattgttgcataactcatccaggcgagcatcaccagcgtgagcaaatccagcaaccagagttaaaagcagtgctaactttttcatgatgattccttattcatcctcttcgataggggtataataatgcgcattgcagatatacgcaagaacttttttcagagacatatcagagaatgtcggatcctgatttcgtctcatcccactaccagtttcaacagcccaacgtttgttagctggattgtatgtcagccagtagcaatcccattcagacagagtatgttcgaacagatcgaaacgcttacgcccatttgcttgcggccttacaaaaggttcaaccatttctaaagcggttaacactcgattaatgttcgaaccgtcttcatccatcgcgatccgcaaacagtattggttaatgtccggatccataccatcgatacccagaccgatagattcgaaaaattgtgtcgccgcgtgataagacacactagaagaacgatattccaacatcacggggatcttttccccatccttgacgttgttaatgatatcctgatcgataagttcaatcaggtctcttttctccttgttcaaggtagaaatttcttcttgcagcggggctatctgtgcatgaagttctttgatccgttgatcaattacggttacttcgaaagctaaatttctcattgtacccattccccgtttttgtcaatgtacatgatccaatcagcaaccgcccaatgggaagtattgcctttcggagtcgctacgatgtaggaaccagctttaaacagtacgcgtttagtttcgttcaggatcaggtcgctcataatgtattcctcatttaaccaaagtgaatcgtgattcataagcatcgttcgggcgctcatacacagtatccgaacttgtgatgacagtatacacggcttctttcacaagatccatgattttctgtgattctccccagacattgatactaaaatacatcccatttttaggaatagggttgtattccatatcataatacatatccatgagttcacaaatgaacaagcggcgctgttcatcatcataagtgaagtacatgttaaagcaatcaagagatttgctcaaagtaatttctttaatagctatgttatcttgtttgctcaaatgatcacggatcgcttgcacacaacgcagcaggttagggtaatcatatttttgtgaaacaatgacttgatgtgaaacgctcataatgtattcctctcaattagatgcactcataataaaaaagcccccgaccgaagtcaagggctttttgtcaaatgatttgtttttcttctaacagcttcgcggttgtattaaccatacgagcataatcacgggcttctttctttgtatacttgaaaccagcgttatagctcgccagcgcctttttcaagtcgcctttgtggtaatcaagccagtactccagttcatagatcgcatacttcgatccaccttgaagagtttcgagctttttgattactacgcgtttaggatatgacttatccattcgtgcgctggcgctacttgcggtaacttgccagcatccataagcgtgatggccttttttacctttaccgacattctcacatgcgcgagactcgatccaggcaatagccgctaaatgatagcctaaacgtttagccttatctttttctacaggttttgcagtcttcaaatcatagttgtgtccaactcgataagcatactccaaaacctctttctgcttcggtgtaatgttatccaaatccttgatgtaggatggagaatttttgtttgccggaggcttcacagtagccttttgtaaaggcaattgatgagtaggcaaatccgcaatgaaatcccctagcggatccgtcgcagcgttgccagaaaaagagcacaagaaaatgctggcagcaataataattttcttcattttaatacctatgttgcaaaaagaggggcaataatacaccccactttatatttatgcaactattttagatagttttcgcgtcacgtagtttatcggcgataaactcagcaatgttataatttgaaatagccttgttaggatcgtatagcgcaatgatttcatctaacgataccataacggcatgtttaaagtagacgctccagctagtagtaaggatctcactgttgtcaaatccacaatcagggctgaacaatgcgcggtatttgtacccactgtatttcgtcagacgatttgtgctgtgcgcatcactggtgatcagaaaagtcccctggtgagtttcaacaacgaaaaagtatccgaggcgttctttgttgtccagcatcttttcaaacttgcgatcggtttcttcgcgaacaatacgagaagtcagcatttccaacactttatcgtattcgggccaatcattctcgatcacgattgcatcaaacgggttcttaccattaatcccgcgcccgatttcgattttcgtgcaaatttcgttgaacgttttcaaatcttctggtgtcagttctttaagatcgctcaattttgctacataataacgtttttctagtttcattttacggaaacctcaattcaaaaataatttcacagagttaccacatttagggcatgtgataaattttttcacgacataatcagcagcagagaaaaatccattgtaaatcgattctctcttttgctgtatatcagatagttcgtattctaacccacttttacagcaactacaaacagtaattagtttttggctatggatgacagtaatcatatacacctcacaaaaagggggctttcgcccccatcattagaaattgtcttcgacaaacgccgcgagacgggaacgatacactgtatcaagaatgatatggcttgagtgttcgtattctttcagcttttcaacagcccatacaaacccgttgtttacggcagtgtttcgagggttgtcgatctgcttaatgttcccgcatagtatcagaagtgtgttctctccgcaacgagaaatgatagatttaatttcatggttgctaaggttttgacattcatcaacaatcagcacagaacctttgcccggatccggatgaccaatactgcgaccacggaaataatacaggctagggaattgcaccacccctttttcaatcaaaccttcaatgtatttttcagattccggattatccttaaacagaatgttcaggctagtaatacaaggttcgatagaaggccggagtttttcgcccagtgtaccaggaaggaagccaatttcacttgataacgggctatctgacttcacatacatcaagttagcgtaatgtccactattaaccaggtgcatagcaccggaaacagcaagcattgttttaccagaaccagcgccgcccataatggtagcaacatcgatttcattgctcataatggattcaacgaaagccgcttgcagagaatcacggggctggatagctttcatgagtttgcgtttcatcgcctgttcgtgcttaacaggtaagacattcaagcaaatctcatcagcagtcaccacacgcccgactaactcaccatttgaggtaatgtactggttaggataaaaatcttcgtcaggaagcgaactgtaagtgatttgggctacattatccgtatatcccaacacttccacagtatcccagaaatcagggatctctacataaccggaatacaatacatcgctatcttttaacgtatcgtcgccagtatactgttctaccttacacccacgggacattgcgatcagcaacatcataatatcgcgagtaactaaggttgcatcctgctgcatacaagtttcaatgattcgttcgtcttgcttgtcaagagcaaacgttttgtttccgacataatcaaccactttaagggtgatagtgtcagacagtgctgggtttgtcaggtttaaaggaatacctgatttcgtaatcgcatcatatgactgaccgaaaataacttttgacagaagccggatcgccaatcgtgcttcgtgcgctgttcgttctttcgttttcaggtgatctaattcacccatagtagcagaggtaataatgatttctgtaccaggttgagtgaatgaatagattgaataggggttactaatcaaaacattggtgtctaatacgtattttgacatacattaaccttatgtggtttcgttaaaaaatgcaccgaaaacctcttttgctttccggttataaacggattttgcttcttctggagtgttatagtaccccaaaaattttctttttccatctatgtttatctgcgctttgtacttcccattggctttatgataagaaacacctttcaaccctgtactactgtttgagttacatttctttttcatcgcattttgctggttcgtcgctttctgtaaatttcttgctgtatctccattctcaacaccatatacatgatctacgataggaggaagataaccattctcaacgtaaaacactattcggtgtcgcaaatacatagaacctttaaaatgaatttgggaatactcgtttttgcttccggcttcacttccaggagacatagggccgcgctgaactttccaatacactttacctgtagatgtatcaacatctacaaaattcagaagagattcgatcccttgaatctcttcatgtatggttcttgatgaatagccatgacttttcattacatacccagcgaaattacgtgaatatatgctaatggatgtttcttttgtacacaatgcatgagtgtattatacacaatgtccatgcgttcattgcgcgtaagatcacactcatcaaaaataaggtttattgcctggtgctctattcgacgtccacggaaatgattaagaattgcccctttactggtcaatacatcacatccggtagcaccatttagctgtttggcgtcttgtgctgcatttaacgtatgcgctacgtaaatgttaagggaactatgggaacgtttcataaaatcaaacgcgcctttagtcttttgcgtttctctgcccagatccagcctggtttcgaataccataaaatcgttagggccgtaattatgcgttggttcttccaactctcgcataagatgcatcttacgacattcttcaattgtctttacataaaattcactattcatgttttacctttaaggggccaaagcccctttgttacgctaattccacatgcggggcatcaatgaattttgtttcgatcggaaggttcggatcatttttccagttgataccaaaacgcagtttaacacccagttcatcacctgcttgtttaacagcattcaggacaggcaaccacactttagggtttgtttgccagccttgaggcaacacgctaggatacagatccaccgcatcacccgtgatgtgttttgagttcattgtttgagatacacccttacggacgttctcgcgctgttgttccacagtacgcagaccttcacgtacaccaaaatcaacaggagacagttgcagagcacgttctacgactttcaccagttgaggtttaacgcctttaaggttgttaaggcttttttgactgaatttaaacataaatcacctcttgtaaaaataccctgtttgggtacacagggtatttatggtttaagaggttcgataattaattagtaaaggtcaccgaaacattcgtcatattcacgtttacgttcgatttgctcgtttctacgatcttccatatagggaggaagacggtcttcattgacttcatcaatgtaagcctgtgcatcctcttttgttagaaagagtgcatggaagttatatccgttgtacccgtccatactgcgatctttaagagagaattctgtgtgataatcccagtctttgtacagggtgatacatttagcaaacagcccaataccgcgatgaatgtatgggaatccagtaacaatcatcttgctacccatttccgcattttctccgttcacgcagaatacttcatacatgatcgcaccaggtttcacatctttcttaacagcacgtttttcaaaagcacttttcataatatattcctctcaattggtgtaactacagattactagtttattttctggatgtcaacaaggtttatcgttttttgacggaaaagttaaagtgaacaaacgatcatgaaggttgtcgatccgttcacaagcctgtttcagtatggttttatcaccatcatttgttgtttcaatgcatccaagttcatcagcgtcaatgttcactacatcgctcatcaatgaagcaaacacgttagcatcaggatgtaacagttcttcgatttcggccttcatgccgtcgtgttcagaaaggatatcaataatatcgcgggttaaatctccctggtacgggaaccctgtttctaaatgattaatgatcctttgtgctttcgtaatcataattttacctacaaaaaagcccctttcggggctagttaattagagttcacagcaacggcacacaccgtattttgtaaatggagcatcaccgctaacgtaggcccagaaatcacatgcttcttcggcagtatcgaagattgcagcatcatagaacccgtgggcttcgttaccgttctcatcaatgaaaaccggagtccagatattaggattgaagcaatcgtcaacaacaacccaaccttctttagctttcattgcttctttgttggcttcgatgtgagctaagatttcgttcatgatgtccatttttctctcctaaagtgcgtttcgtttcgacagggctatagtctcataaccccgtatctacgtcaacacttatttgaagcgaattgtactatttttgaaaaataatccagaacacacagcaccttcaattttcacccctgtagggcttttagcaacgaaccctgttgcgtaggtgtctttctcatcacatgcgaaccaggcgcggcctgtgtacgtgatatcggtaaacccgttagcagtcagaatacgttcggcttctttctcatcggtgcatccagcttgtgctaaaacgacaataacgactaacaccaaagcaataatatatttcatgttaaactctttttaagttggttttactggcttcaatccagtaaacgggatcagaatagttaccgcacatacccagtaacacagttgtacaccctaaatgatcggaaggtcgcaatccatcaggatgaaaaggcaattcgttaacaccaatactggtagcaaaaagagcacctccagtactgtaaaatgttttgatatgatcgtatgcatcatcaggccactgaaaacgataagttttattgtcaatggttactgtatacatatcatattccgtaaacaacggatcttttccttgtgttgccccatacagagcgccgcgccattcaaccagatttgcttcaatgtcgcttacacaaatttcgttacccatacgcaaatcatgaaggatcccttcaatggtacgaatagccccgctaagttcattagttaacatagagtttcctttaaattggtttaatggttttcaggtgtagtttagcataagaagaaccaaatgagttgccattatgatcaaacttatgttcttcactcttccagtatttccctgatttcatcaagggtatacgcttcttacctgctgttatcgtttcaaccattccggtatgagtgaatgtcatgatataccctcttctttcagcacttcccagatcagcttatcaaggtgcatcagattccacataacagagtcataagaacccagtgagcgggaataaatcactccccatgaacgataacttttctggaatccttctgcactatctgcatcatacggcatatcatcaccggacgcaatcaaaagtttcaggatcatcagactgttcagaagttttgaactagcgtcttgtgcttgtaattttgcacaataattttcaataatcgcttttgcctttggttcagtgatgcgcccgtttttgcatcgctctttatacacatacataagttcatcgattatttcttgcatacattctttccttctgttctgtactcatgccatacaactgagagcgtatacggtcttgtatacgacgcgtttcgttttgcatcagttggtttgaaagaatcaaatcgactaccgcgccgcgaactttccatagataatcaatcatcgccatatcttcatcagtatggaaacccttcatatcacattcatggataatgctttgcctttccgccattgccatttctgctgtcgccggagtagccagagaatattcatacttctcgatcaacgattccagtgtacgcggttttacgggaatgtcaatagttattggattaatttttatcatttcaattccaccgcgtacacatccaattcaggggctttgtgtacgcgcatatctttaccacatacagcataagccggacagttacgacaaccgttatgatccttgttgccaatcaattcctgacggaatttcttagttttcggatgttcccagatatctttgataaagtcgctggcttccaggacgttaagcccttctgaccatccaccctcgacccaacgttcggtaaaggaacaagggaagaattcacccttctcgttgatgtacgaactaaacatagtagcttcgcaatcttccgcatactgtttgtactgttcaaaattttcatgcccttccatagcctctacaaaggccggagcggaacaggaatcaaaaccgaaccctacaccagattcaaggcaatactctaccagcgctttatactgctcgcgtgtaacggtatcccagttcttcccacggcctttttgtttcagacccaggaatacgatcgcgttaacttgtttcaagcgcggatcattcttcaccgcatcaaccacgttaaacgcatcatcataggttttagagctaaccatgaaatgaaggttgatttgctgttgtccggcttccgccagattagccactgaattaaacgcgacatcgaatccagcatgtttgtatactgataccgcaacagccccagcaacagccgctaaacgcgctgcaacgtcttttgatacatcagcaatggtaaggttaggcacaatgcctttagaacgcgcataggccatcatatcaaacatatcagggtttgtttgtccctgtgcatcagcaccgagggcgcattgtgttaaccagggcattttatcaatgatagatttgaatgtatcaagatccatattgaagccgttagggttattagacttgtagcagaaaccgcaaagtttaccagaggggccattgcatttagttgtaatctcgatatcgagaataaaaggaaaatgactataaataggatcgtcagcaggagtttttccccaagtcatcatatgacctgttttcatatcaaaattaaaattaacctcttcggaacgatagattttctttcctttcgcttccagtagaagtccaacaggcgttttgatatgtttggcgtttactttaacgtgtctcataggaacctcataatgtattacgtttacagaatcacaaatgttatagagaacaagcactattatggatcaagaaaacctaaaaagtcaatgcttgcttccgacgatttagggaaacactatttcagtagttcccgtgatagtcatttcatccaagatcagaaggaaaatccaggacactacaaatataaagtaatcgtatctgggttgtcaagggaaaaggcgatgaaacttgagaaaaggttacacgaaatctataaggtggacaagaacccacatttttataacaaacacatacacaacagtgttgatttttcatgtacaccagaaacaggaaagaagatttcgcaaacacaccagaaatatgcagcaaagaaaatttcagaatcacataaaaggcgattcaaggaaggtatagcatcacataaaggagagaataacccacgatacaacgatcatcggtcttataaagagatacacggagaagaaaaagcggatactatacgcaaagcacaatctgaatcaagaagaggaaaaggtaattcccgcgcggttacgtggaaatttacttcccctaatggagaagaatttttagttgaaggagaatgtaaaaagttttgcaaagacagaaatatttccatgcgtaaactgaaaacctatctgggtgaagtcatcacaacatgcgataaaccctacgatatctctaagaataccgtaggatggaaattagaaaagattagttgaatcttcttttacgttcgtcagccagttcttttttgtacgttttaacgtacttcccgttaagggtacgaagttgttggaaaaccttgttgcacaaagcacgtttcgctttgtattccggcgtattgcggattgattcgatcgtcatacccatttcgtttttagggtacgcgctcaactccctgccgatctctctgtgccagttgcttaactgatcacgctgtgctttgtactcttcaaaagttaacattataactgatctccgtaatcgttcgctgcatcttcgggggttgcttccagtcggtaaagctcaacggctaacggactgggtttgatttcgcggttcaggatctcactgataccgcgaaggaattcgatataaggacggaatctcattttatacgtaccgcgttaaaagcctggttccggagatcatacgctttttcaagctgttctgtagtgaacagagaactatccgagtttaccgtgaaactgcaaatggttttgttgtcggcgttgacttcttcgacaacgatttcgtaaccccagatcccgctgtactcacatttcacgttccggtacttgatgtaaactgctgcaacatcttcttttttgtagttccggcttttgtagatgatttccatgatttcctccttcgtttcgatgtgtgtacaataacagatcagggttatcgagttttagcaatttgtgctaattatgccattttcttagcgattttccaggaggctttgaacgccggaacgtcttcaatatcaatccagaaaccagatccgaaaccatcactatagcaagggcaaccgtcgcagtagttttcccaggtcatcacttcaccaccaacagaagcaccagtttccatagcacgtaatgcatcttcaactttttccagtttttcggcgttgtcgtcgtaaatgacaaagtaccatttaccgttgtattcgttacccagtttgattgattcgcgaacaagtttcatgatgatttcctttttgtctgtttcgtttctatgtatgtaagataccacaaccagattttaatgcaacatttattttgcttcgagttcgatatttttccatgttttcatcggaacccctatcgcatcccaaaacttaacatcttctgctgcaatcagagtaaagaagactccagttttccagtatttcccgtttctgatttcgtttgcgatctcgttcaaccggtcgcaaaaatgttcagtccaactaacatcaccatcccagcgagaacgtggattgtatagagaaaatatgaaactatcaatataagaagattttccggtagagactcccatcaaaacagccaggattgtgcgaaccgcatataaattctgaacctcaacacttctcgttttaatagtcatttcatgattcctctgttttgtttcgatgaatgcaatataacaaaacccctcaccattggcaaggggtttttgcaaaaattatcgtttgattggggtattatctataacccgttgaatttccgaacgcatcgtagaatactggcacaattcggtaagcgcccgatccaggtgcatcatagcgtaagaaaactcttttccgcatttgtcgcatctagcgtataaatgtaaatgaattcgccctatcccatctacctgactatatttctggaatatgtaaggatctgcacctcgatagccagtagcttcgtgcttacactctcgtttgaaccatgacattaataatatccttgtacgttgaagcgatcacacaacaatttttttgtttggttagtatcgttttggatagaatgcaacatagcggtaatcatgtttaggttattttgcatcatttccgcgctcatgagaacttccatacgcgcacgtaagcgtttattttcttcttccaactcaaccatacggtcatatgctttgatgcgctctaagggcatatcaggacgctctttgagtacgcgagcacgttcaacctcacaagcatgatttgctttccagtggttcgattccgcttcaaatttattaagacggcggatctcttcaaccagctttttgatcatgtatggatccatcatgtcgatgaatttcatcaagcagttggattttgttttgttgtcagcaccagaccaagaagaattatacgtaactgtaaacgcgcggcccatttcatcaacaacaccgatcttgttatcatcggtgattgtagccgcccatttctcccgcatggctgtacaggttccgctggcgacattatgcaacttgtttaatgtcgcatcatcaaatacaatttcatcactcatatatgcctcacatagatttcaaaatacgcagaagtgcgttagtaaagatatcaggaacacaaccaccaaacaacttatgattcatcagcgctaatttcatgctgtgattttcagtatatcgcccgttatggatcccccaggcaacgacattaccaggttcatgaataactaagttagtgagagtaacggtcatgcgctctttatcattgatagagaatgaatagcagtaaccggatccgatgtcgccgtaaaggttaaggtctttcaatttcccttgctcatgcaagcgtttcatatgaactgcacatgcatgattaatagtcatttcttcatccctagcccagtcatcaataccagaggtataacgaatattgaagtagttagtcagttcatttgatacgctcattagaaacctcacttttataaaattctttaccagacccattacagctactgcatttgggggaacggttgttatcataccgccccgaaccgttacatgcaacacatttccttaatttccagccatacacgaacctcatgtaataatcggttcgtgcggccttgcgttcatggaaattcattcgatttctaccgagtaaccttctttacgtttttggtcagcgaaatttcttgcgcctccccaatcgtaacaggttctacgaccaacttctgaatcattatgaaaccaaatcacggtatatcgctttcccataataacctcttaaactttgttgtaaacctgaaccaaccacatttcgatgttaggcgcgtaagtaacgtttaccttatgcattgtgcggtatttgtaagcggctttgtatgcatcgagttcagtcggaacacagaaagagaaaccgttgtcatagcgttctgcgttagaaacttcacaaccaactacagcggcaatatttttgttcatgttcatgatgttttcctttctctgtttcgtttcgatgtgtgtaatataacaaagcccctgcactaatgcaagggctttttgattattttggtaatttttcgattgttgctttcaactcattgattttattaaagagttcatcgctatatttcatcaactcactacggcgtttttcggcccacttgatcaggaattcaggagaatctacaccatacgtgtaaccttctgcactcagttgaatacgagcacgggaaccataatcaacagaactttgttcaatgagaaacttaaccgcatcaagcagggctaaatcttcatgacttaccatgattccttctgcctttggaagatccacaacttcatcctgaatgagttcacggcgggttgtttcttccagtgtttcatgattctggatcatcgtttcgaccggatcctttgccacggctggtttgttttcacctacttcttccaaaaacatcaacatccatccaggaattttagtccggaaagaactttgtacttcactggtgcatgaatttcccagaatgtggatcgcgttaccatgcatatcagctttattgatatagataacgttctgctgttcctgtcggttgctaccataagaaaggaagcggcgtaacgatgtgttatgaccatacttccctaaatcgatttcagccaggcaatcaatgatcccacggttagaaaccttgtaacgcttaccctgtttgaaaaataacgattcttccaggtgagtaggggtaaactcttcataaagaacatagaattctttaggaattttgcgctgaaccagactcagtttacaattattagaaggaacaataacagagtgaatgtttccttcggtatcacacatagcttgcattacttgcggatagtaaagatggtctttcttgcaagtatagctatggatacgactctgacgttttttgaagtaccatttaccagtttcaaaaggcgctgttgtaaaattcattttgcattctcatacatagttaaaattgcttgcatatgttccggtgattgtggaacccctgcaaagttcactttcaaaaagaaattcaaccgatcttttatgttgcactcatcgagtccaagcgctggcaatgaaatgttttcaaaagcacgttgttcatgtctttccatttcaccccaaaacaaacgggaaccgttaggcatcggtattccaatttcattgttccagaatttcatgatagttgtcaagcgttgttttccatcaatgacttctacccatcgagattcgttgaattcactatcaaccgcgatcgcaatgataccgcaaggaaacccagtaatcaaagtcttcatgaaagcatcttgctctttctgcttccacacgtagggccgctgataggacggattcagatccagatcgttgttcttgaaccaatgaatgtaactaccaaccatgatcgcatgatcgcgactttggaaagtttttaactcacgaatacggtttcttacaatttcgtctgtcattataaaatcaccatccagtatataatcgtaatcataaccgctacagtgaaacacattgcagcatacacacgcgcattatgaacctgtgttttcaattctgcgatctcttgatccttttcgctttcaaactcttcgcgagtaccataatacccaggatcgttagcagttgccaatctaaccacatctttttcaaccagcgttgcgtaaccgctttttatttgtgtcgccccgtaccatccaccccgatcgttgttaatgatcagatgatcgcctttttcgttatgctttgattcgccaacaacaataacccgcttaccattcataatatgatcctcaaaggggccgaagcccctatttcgcgttcttctgtagataatctaacagatttccgctttgatgtaaatccaaaactttagaaaacttctctgcgtttctttcgtttgtgagttcgtcgaaatgccatacaccatcatcagctattaacgcgccaggtgatgaacctgtttctacatcacgggaaagcgcaagccccagagggtgtaagatttcgcggttaatgcgccaaacaaggcccatttcagatagagtattaaaatcgacgtatttcatattatgcctttggtttcacaccgtaggccaacataccgaaacgatgatcattatctgcatctttaaacagaacttcgttaccatcaatgcagatgacctttgcttccggatcgatgtatggaagcaaccacaaagggatcaggcgtaggccgctatgttcatcccagcgactgaaattaagttcttccagttcatcaagggaaaactcattaggatcgatataacggaaccatttggtatttttgaggcggtcagggaagtttacaatttcttcatagccgaattcagcactccatgaagagtaaacagtgacttcggatgctttggttaaaacagcatcgcgaattgatttgcatatatcgattaaagtcagttgattttccatgatatatttctcatcttgctaaaattttaggcagtagttgccccatcgttttacgtgcatgtgacggaatctgtgagatcgggacatatttaaaatcatccatttcacgtatagtccgtccgttcttaacgaaagttgatgcacaatagcattcttccgctactgggtaatcttgccctacatagaggaataaagcaaggttttttgttttcgtgtaatcgagaacacccaggctaaccaattcctccgcgaacacttcaaatcctgtttcttcgaagcattcgcggatcgccgcgtcaatatgagtttcgcccttttcaacatgccccttcggaatatcccaatggggcgtttcagtggcatggcccatcaacacggcaccatctttaacaaagataatacccgctgatagttccatttattcacccgcaaaagcgttatcaaatgcttcaagtgcgttgttagcgcgagcactggcttttgtcacaccagcctggagattttcaaagaaggtatgtttccacacttcgcggcgactggattcatgttccagactgtttttgtgatcaccgcgaatctgttcttccatgtcataacggtacagatcgagttctgcgtttaatttctgttctaatgcctgtgcaaatacatgttcaatattcattttgtatagcctatttcagatttaaggttttcgagggtggagtgataaacaacattcccttcgtgtcgagtataccatacttttccgttctggttacactcattcattacattttcatctaaaccagggatcggcttcatgctgggagaaaacgcgatagacatcatttgttccgcactatcagcaaacccacaagggaaaacagatccagttggtttatcaagatacatcaactctactttagccatagatttcttcgaaatcctcacaatcaggcaaatacgtttcacagaaggtgcaaagcgtaaagaatgcaggttgacgaataccaggattatccggtagatacatccagaaggtgttagcaaacacgatgaatgttttcaggttttcggtggtaatttcgctaacaccatcatacccggattgattgatcgcgcgttgcagtggcacctcgtactgttcgcaatagtcggcataatgatcgcttgttacaaggccattagccattttaatcaaatcgacgattttcatgattttacatattccactttaacaggttttgcaacaaatttatctttggtgcgcccatgaccattacacaggtcacattctttgttgaaatctttcatatcttcgacccatccagaatctggcaacccagacggatatgcgttataacgaatggtttcataaccttttccgttgcatttcgggcaaacatgaggacgttcttttttagcagactctgccagttcgcgaagggtggtagaactaccataagcccgacacatgttttcaaagtcttttaaagtcattctataaacatcaatgacgttatattttttgccggatggtttagccataatatatttctcacttaaagaattttttgatgaaagagatagcaaggccgataccaaagaaaattaagtaaccttttccgtcaccgtgcgccaaaacatagagtgagctgccgtatgcgatgagttctgcgatgttcattaagtttctcatgatatcctcctttttctatattaagtatcttaccataatataaaccaaagtcaacaacaaagttttatcaacccacttatcaccagtcattagtaatcccctacaggttgagacgccgcaacactcaggatcttgaaagtgcaattgttccattcacaataagtttttgcgcaatgaacacttcctttcataacaaacccgtttgagaaaattaaccagtaaagtttcatgatagcctcctttgtttcgacaaggccaatataacaaagcccctgcacgaatgcaagggcttttttcagtttttcaacatccaaagttgcggaggacaatctttagaagcgattagacgatccaggcgggacataacccgacgataaccgtcgtattcaaaattaatttttggtggaacgtagttgacctggattgtttttctgttagctaaagaaacatactcagggatcaccgttcgcaaccgtatagcgatcactggcttctcttcgccttcgttaaagaacatttgaacagttataggacaagcaaagattttaccatttacccgacgataaacaataacttcctgtgtcccttctgttttggccttcaccgcgtaggttagaacataacacgaataatgatttgctagactcatcatgatatcgcgataagtttcaatatcttttttaatcgatactgaacggtctttaaagcgatctgcaatgtggtcagcagtagccgctaccttgattgtataccagtcacctaacgcgctagtaaacgcctcgctaacttcttttcgtacactgttaacaagatacattaaacgtgttctgttcatataatcctcactgatttttgaagtattcgatctgacgcaaacgcttttcagcggcggctttcgaatcgtattcaccaagttcttttgtgcgatcgtgattcaaaacaacccacttatcgccacgctgttcaatgtgttctgtaatatcttttaacgacttatccagatccagtgattcagcctcttcacagataatagtcaaatccacgggcagtgtcaacaacctttttactccgctgatatcatcaagcatcgaatcgtatgcaagggttacgtgcggtttgtaatccggataatcgtatgttgcgccagcatcaatagaatctttgaaacggctatgcaggtattcagattccaggatccctacgatagtgctaccgtattttgtgtcccacttttcaacatcaaccagtttagcaggttctgtgatgtcctgttgcgggaacaaatcaaccgttttccggctgtatacgatcgttgtatgcatcttttcggctgaaacagcattctttgtgatacctaatgtcttttgaacatttttcaaagcctcacatgaagcctgatcgaatttagcacacatgtagataccaggatctacaacaggttttgtgatttcaagaaatgatttcataaaacaccccaataaaaaaggggccgaagcccctttgtaataaatttgtttttacgcttcttcgccaaaggcggcttcatcttccgcgcctttttcgacttcaacggaagggatcagagcggataccgcgccaatcactgcttctggggttactggctggcttgcgtcaatacccagtaccgaacacaggtcggacagaagttgacgatgaacagagagttcactttctttttgcgcgattacttcgttcagatcgaatgcgcggcctttcagtaccagtacttcattttgcagtttttgaatatcagacattttattacccattgttaaaatttaaaagtatcgagcactttgctctttagttgtttcaaagtaccttcgttagtgatgatactatctcccggttgaggtgtcaaacctttttccgtggaatgttcatcaacaattccggtatcttttacaataaacacaaacttagcacccaagcgtttcaggtatttatattcgtgttcctgacgacagtcagttaccagaagatgattgtattcgtcaccagcatatttattgacgaatctttccaatgtgtaacgaacccaaaccgtgttatcatacttgcatacgatatcagttccaaacacttgcatcaagcgtctgatactccagggagtatcgttactcataatcagattatcaatatcatcaggactataaacaatattgtatccacgttctttgaggatttcaagcccgattttgaaaatatttagaacatcttcattagacatcacaagaggtttctctcgatcaccttcgtaaaaaatagcatccggatcagaatattttccttcaaccagactacgaatgtatggtttatcgtaaccatatcgctgcattgctactcttagcgttcttttgataccaaatgccagtgcttcacactgaacatcattgtacgcctcttgaataaatttagcaaccgtatctttaccagttcgcttttttccactaatcacataaatcattagctcattctcttttgagaagtgactacttttccgtcaatttcaacttccatatgaaggaagccaaaagttgccatacacgtaaccgcttcatcactatcgttagtataacccaattcaacctcacccaagtttgttgggaaggcaccataaaatctaaatgtggcgatcgttttcatctgggagttatccaggatatgcacagcgaatgattgcttaggatcatcccacgcaacagagttaaactcgttgtaatcgtttgtgctcaacatccatatgtaaatcccaagatacgatctcatttcctcatcgactacaaagcggatcatcaaaggatcaaactcaaaagccgaaccaggtactttacctcgaaccatcatatttgcaggaatatcaactgctgggaggttcattgatggtagtgtaaccccttgaacttgtaaagtcaaacctttcatgtaactgttatcaggaatatcaacccgaaagtttgtaggtgagatttggtttaaaatcatttctgtagacataggatctcctttcctctatttagcggggaacgggatcaaagcggcctgacggggtaatataaaaatttgaagaaaatgcttgaccttttaaaatctttgatctataataattattaattaaaattttatcaaaaagatctaacaagatcaagtaaaatttaatgatctaacaagatcaagtaaaatttaataaataatttatcaaaaatttttagatctgatcttgaattcataaattttatgatctataatatattaatattttattttatcataaatttttatgaagatcaatacttagatctaataaattttatgctttttctgaaaacttttcctttaccccgtcactaaatactggtactatgttcccatattggaaatcaggaaaaacaaaatgactcacttgaaaaaattcaaagaatttctgaccgaaggtaaaaccctcgctcgtaccgtagcacgtggtcaacgcgctaaaacttccgataaacattcaatcggttttcttcacttcaaacatggttctgatttcgaagttttagcaccggattctcacgatctggcatacttcggtaaaaacattgtacgtttgaaaggtatgactactggtaaagttcaagcggcttatgtcgattgggctaaaggtactgtttctttctacagtggcaatccggatgatgatctggatttcgacaaaccagaaaaattcaaagctgctactctgtatgaagaggcggaagaaaatctggatctgtataaccagttagcagaagatttcgaaatcgagatccctatggatgaagctctggtgaaaggtaaagtttacaaactcccaagcaacgatatgcgtcttctgtacactgggcgttctaaaactaaagcaagcggtgaatatgcagtgtttaccgtagttgatgcttccggcaaacctcgcctagtatctggtaaaaaattcacccaagaatataaaggcgatatggtttctaaactggttctggctgaatccgaagatctgaatgaagcggctaaaggcattcgcgaaaaagttattgctgtgatggtgaaacgcgggtttaacgaaaaagatgcagaaaagatggttgacaaaaacctgaaagatgctatgaaagttagacctggtgcgacccctggcaaacttgcagaaatagttagcaccctgtaaaaataaagccccttcctttcggttggggctttttgattagtatttgctccagactttttttgcgccgtaaggtttccctttggacataaattgctgagtcggtagccaaacagctttcgcccaatctttaggggcaatctctgctaatggtgatttgaggtgtgatggtagatatgctttgatcatttctgttgcgcctcgcatacctttcacgttaccccagttaattttaagcacggtcttgttagagaggcgtttagtggatccgtaccctcgcttcaataactcttctaaaaactcctgtcgtgctctgggtggcgcatagtgcaagttcaaaccatagaacactaagttacccgctttcgatcttccggatcctaagaaaatgatcagtggaaatctatcccaatacggcagggtgtctttatattttgcatcatatgcaaacgtgtacaggcgacccgttgctggttttgccacacggtgtgttttgatactggttttgatgaaattaccaaaccattctgttgaatctttctgtcgctttgccgccgatacaccaacagtgatctttttcagactattacggaaatcgttgatgatctcgatcccgtgttttttacggtagtcattacgttttttacgggcttctgtctctgcggaacgtcgttcaatctcatcatcaatctgttttttgtaacgatgcattgactttgtgaacgttgcgtagtttaatccctcagaatcggcaaaacgtttagcagaaacacctttcgtttttgccttacggaatttgatccccagttcaacccaatcactcaatttgcgtttgggtggtgctttgggtttatcctcttccgcgatgatctcaaactcaaaaataaaactcatgtttccctccagggattactgacctcgccacccaaaaacttttttgagtgattcttctgttacgattttgaactgccagcctttttgacggcatagctcatttgcggctttccacttatcaatattaactgtataggtgtaaagagcatcaataaatttctttttattgtgtacgttgttgtttactggcttcggtggaggcatggtttctttaaggggcttaacctcccaaagatatgtagtaccattttccatttccacatagaaatccatgtaatagcgtcttctcttaccgtctgcattgcagaaatacgggatcactatacattcagaattccaacgttttacgtgtgggtttttatccagccacttcataacgtagcgctcccacgatgacctatacgtaatctttcgcggatcgcctttatacttctgtatgttttcgggtacaaacgaccctttatacgtctgtcttccagccattgcgtaaatcctaaatagaataatataacgtttagataggggaacttatcgtgctattttcatacttcccgcctgttgattacaaaggcacccagacaactgatattttccgagactatcgattttattttaatcgtgtgattggaaaatataaaacccgtagttaccagataacaggcacactacgacctgaacaacttgcagaatcattatatggaaaccagcaatactactggatcctgttgatgcttaactctgtttatgaccctttctatggttggatctccgatcaggaagccgcgtatcagtgcgctatacagcgttattctgaggttggcggtgaacaggttctgtatcatgtagatgaaaacaacaacaagtattataaccttgtcgaagaccccaataaccctggtcattggtatgacaaaggtgacaaaccaatgctgtatttacagtatcaaggtgtattagctcctgtagatatttatgaagatgcagtgttgcaaaatgaagcaaaacgaacaataaaaatcattagtccgtctgacatccaggcgtttctgaatgattttattaaagaaatggaaaaggctaactcatgaaattaggcggaaatttacactcccctttctttgatggggtggttgaaaacgttgatgatccgcgcgggttgggccgtgttcaagtccgtgtatttggacaacacccagcccaaaaacaaaaatccgatgcaatcggtgttcctgttgaagatttaccctggatgatgcctattcaggatattagaagcgctgcgatctctggtgtgggcttctctccaactggtatcactcgcggatcctttgttgttggttattggcgtgacaaatggcaccaagatggtatgataattggtactgtcgctggtgaatatgtcgaacaaccagacacacagaaaggtttttgcgatcctatgggtgaataccctcgctatgttggtaacgatgttaactcccttgctttaggtggtttgaaaggcaaaggatcatcaagtgtcatcattcgtgattcaaacacaagcatagcagtaaacccagacgatcgcccactggatgagataccagaagataaccgccctgatacgggtggatttacgatcgaaaagatgctcaagcaggatgaggggatccgtacacgatggtatacagacagtgaaggatatccgacaatcgggatcgggcatttgcttatccgcgaaaagactcgcgacactgcaaaaattaacgctgcgatcagtaaagcggtaggtcgagaagtaacaaacggaacaatcacggcagaagaggtatcaaccttatttgctcaagatttagccaaagtaagatctgatattcagagaaccgctaacgtccgtgaagtgtatgtgaacctcaaccgtcctcgtcaaatggcgatcgaaaacatgtcgtttcaaatgggcgtcggtggtgttgctaaattcaccaataccctgaaagcgatgaaaaatgaagattggcaagcggcttataatggtcttcgaaattcactgtgggctagtcaaactccaggccgttcttctcgcgtgtctaaaatcgtcctcacgggcaaccttgaatcatatggggtacaagtaccagatccggaagggcgctctctgagtgctgcttacgctgcgtataacggtgctacattgttggctgctagtccggaagatccgtttactcctggtgatacccgtgtgatgtttgaagaaccagcatcatcttataatgcggaatatccgtataacatggtgtttgaatcgagatccggacacattcaggaattcgatgataccccaggatacgaacgatataaccgtgttcacccagcagggagttacgaagaaattcgcccggatggaacccgcgttgttaaaatcgtaggggatgactatcagatcgtgatgcagggccggaaactcaacgttaaaggcaacttgcaggtagttattgaaggtgatgcgttcatttacaacatgggtaacgttcaacaaacggttgatggtaacgtaactgagtttgttcgtggcaacgttcaacaaacggttgaaggtgagtacgttggcctgattaaaggcaatgctgaactaactgtaaacaaagatgcaacagttaacgttgatcagaatcttaccgcaaatgtgaaacagaatgcaaccgtggctgtaacagaagacgcaacggtcactgcaaaaaatgcgaaaattgagattgaagaaacgatggatattggtgctaaagatatcaatatcaaagcaacgaataacacgtttattgattctggcgcattaacaaaaatcactggcggcaccgtccaagtggggtaattaaatgattatggattatgaatcaataattgatggaattatgcaaaattatcaacatccttgtgatgctgagatccccgctggctattatcggcgggttatctggcaagggcatacagaaaattatccggctgttggggttgagtgggataccgagataatcaaaatcggtactcatctttatactcaagaaccgttcggacatagaagcacggatctacctgttgtcaattcaccgggaacagatccaaataccggacaaccaacagggatccttgttccgaagattggctattatttcaacactcaagcagagattgatgcttacattacatccatcggtgcaactaaaatcaatggtggtaatgattggtacggcgcggatctgtcaaaatcaaacctatacaaaaaccctggcgaactggctatgtataaggttgaaaacagtggcgggtatctttccggaacaaaccctgtatgtgatgctcgcatacgtcaggcgtataatcaggacactggcgcattcaccaatattgattattattggaatggtaatcgtatagcatatatgaagcatgacgaaacaggggcgcaccagtgcaaatatacgggtatgcaggttaacaccaacgcagatacaagcattcctcctgatcctcctgcaatgccttccacttatggagcattaccgagtgaattaagccgtgctgatatttcgtgcattccggcaactgttggtttcgcatatacaaatatcagtgatgctatgttacaggcatggaacgaaacccgtaatacgttcaagctacagtttaacatgttaacgggtgctgtacagaatggattcgggatcgcgacgatgtttgatggtttatccgtatcgatggaagaagtaatggcgggggcgctcgcattgtcacagcaagcatggcaaactgctatgaaagttttcagacaagtgattagcgctgcatttaacattatcggtggtgcatggggattgattaatcagttcttgcctcaagtaaccatcttaggtgttgcgatcaacatttacgatctggtgtttggtgataattctgttcagactttgaaagatgcgtttaatgcaatcatcaaatccggacaacaaacatatgaaaccgtcataaacgcaatatacggggccataggaagcgcatacaattactctgtggaatatgtcaaagctggcgctcgcgaccttgtggatgcgtgtagcgcgttatttgattggtgtttaacgatgttccaaaacggttgtgttgcattaatcgacttatacggtcggatcatgcaaacatgggctatccctccggaagtcccaaacccgttatggtctgcggtgctggctatccgtaacatcatgatgcaaatcaaaccacttgatataattctgggcggtaacttccctggattcactgcaatggatttgtatcaacaagcacaggaaaaagtcaaggcttttgttgatgagtcatacgaacagatccgagggctttatgaacaggggcaggaactttacaaaacgttaaaaaatcagattttcgaacgtgatacaattcagagaaaattcaaccagtacttaaactggatgtggggcgctgtaacagacgaagcaacagcggcttatcaatctgcattggatgctgcaaacgctgctgtagctgcaacacaggccgcgtatgacgctatacaggaacagattggatctctacaagatgcaatgaaagatacatacagcatggcgatggaagaattaaagaaattgcctttgatgagtacaataaacgagtttttaggcttctgtggtgtcgcatttgacgatcttctcaagtcatatgaaaatgcgattactggtgctcagtctctgtacaaaaatttcattgatagttctcgctcgtttaaagatcactgcaaagtaatctataaccaaatttgtacgttggcgttgagtaaagtcacacaatatgtgaataaattgctgtctctcataggattagcaatcaactttggttcgattagtgtatgtgttccagtactgaaatactaaatagtcgaatgatcaagaggaatttataataatggctactgctaagactaagactgtcaaaaaacagattaaccaaatccccgatatttttatcgggggtactttcgaagaaattaaaacagatctgattgattggctgggtggacaagaagagtttaaggattacgatttttccggctcgcgaatgaacgtactgatcgaccttctgtcgtatgctactctttatattcagcagatgggtaacacggctctatttgaatcgtttattcgcacggctgcattgcgtagttctgttgtacagtctgctcaagatctgggatatatgccagattctcgcacggctgcaagcacagcagtaatgattacggctgctaacccactgaccccaacatcgatccgtatcccgcgcggtacaaaattcatcggtactgtaaagaatacagacagttattcttttgttgtatcagatgacgttgttatcgttcgtgatagtaataacaactatacatcaatgctgaacctggtgcaaggccgtttagttcgtactgaactaatttatgacggttcgagtatcctgatccgagatccaaacattgaccgtagtcaggtacgtttaactgtaaacggcgcacaatgggaagactggacaaacgaaagcattgtaaacgcaacaggcgcaagcacgatttactacatgcgtgaaactgttgatggacataccgaagtttatttcggtgaaggtgaagcaagtcaacaagtggcgggtggtgcattaaccgctgaatatatcgggggcttgaaacctgctaatggatcgactatcgttattgaatacctgtcaaccgatggggaagcggctaacggtgcaaaagattttatctatgtcgatacattaaccaatattagcatcactaacatcgaagaaaacccgactaaatcccctgattatgtcggtgctgatggtggtggtgatccagaagatatcgagcgtattcgagaactggcccctgttatgcgtgaaacacaacgccgttgtgtaactgcatcggattatgaatctttcctgtctcacagatttggttctatcatccaggcggtacagtgctttactgataacgaaaaacctggttatgctttcatttctgttaaaccaaagtcaggtttgcgcctaacatcggtacagaaagaagatatgcaaacgtatctttcgaaatataacctcgcgacgatcaccccatcgattatggatcctaactatctgtatattgtgcaatctgtcaaagtaacgtatgatatcagtaagttgacggaatcagaggaatggttacgcggtcaggttatttcgtcgatcgactcttactatactgacaacgttgaaattttcaacaaatcgttcagtgtatctaagatgttgacttatgtcgatcagtctgatacttctattatcggttcggaagcagatattaaattgctccgtgaaattgacaactattacagtgctcctatgtctgggatccatttcttgaaccaggtggaatcgaaatcaatcatttccagtacgttcaagttcaccaacgaagaagacgaaagttatgttgttcgttatgcttctacggaaatggatcaggatggtaacgcaaaaattgtaataggcccgttcaaggatggggatatttcgatcgctgcttatacaggtgatgactttgaaaaattaacagatgcaggaacccgtaataaatattacgaagtcggatcggtgtctcattataccgatttcattagctttgatctgggcgttctgaacgtatccgccgatagtttcagtgctgcttatatcgagctaaccgcaaagcctctcgaagaaaccatttttactcgcgatggatcgttgatcgtgtttgaaaatgacctacgtcctcaatacaccacattgactatgaatcctatcagtcaataatcgttaacccctgtcttcggataggggtttttctttttataaatacgtgatatacataaccgcaaatttggagaaatataatgattaaagcgccttcgattacgagtttgcgcgttgataagctggctgctaacttcgtttaccttaaatgggatgatgttggcatggatttctattatgtggttgaattggcccgtagccgtgatatggacggaactattattccagacgaagagttaatctggacgcagttgggttatagctacgaaaacgaatggtttagcgatcaggttgccccaaatacacgttataaattccgtattcaaacaactcatgaagggtttgaaccttctgattgggtgatcagcgatgaattatggacgtttgatgagaacgcctacgcatatacaaccatgcgtgaattcacccctgctgattcgtttatcaatgaaaaattcgccaaaaacaatcgtgattacgtcgattttaacgatgatgttattatggcttctctgatggttgaggattttgtatactctcccctgtattctgatgtaagccagatcagcgataagatcctgaaacaagaaagctaccatgaaattcaagatcacatcgaacacgtttgtaatgatatagatcgcacgttcctggtatactcaaacggattgctttacctgtttgaacgttttcagaatatggctaaagtgtcaaatgacaaaggccaaacgtggtattactacaaagcattaaacgatcgtgtaggcaatccggtttcccgtaccgttgcttatcagagcgctaacactacgtatgtgttaggatacgatcgcatattttacgggcgcacttcaacagatattcgttggtcttctgatgaagttcgtttttcttctgatgatgtaacgtttgcgaagctggggaaccagtcagggttagattttgatgttgattcatacaacacatatgcgcgtctaccgggaggagtgtcgaagtatgccgaagctatagcttgttctaatgaatggctctacgtggctgctaagaacgttatgcgccgtattgcgttacgtaacacaccaattgatactgatcctggttcgccgacctttggtgaacgtatttttgatgaagtttcatataccatcgtaccaggaaatgataaaattgttgttaaaaaaatggacgtgctgaatgaccgtctatacgttctggtaactggtgaagttaaaacggcgatgatggatccgactgtcaaggctaacgtgatcccatcaaacgatgctggcgtttatctgtgggatgagaatgcaaagacgtttacccgtgtttatggtaaaaccgaagatgaacgtttttatatcactcatgaatataccaatatgtcaaccaatggcgatgaagtttacatttctgttggtaactacaaatatccaggcactttgccagatctggatctggttgaaaagtatccggaagatgtgcattcagcggtgaaatacgatcttgttcctggttatactgcgagcatttcgattaactttgctacagttcgtgcaaatcagaacgatcctacagtatggaactttgggccgcaagagtactacaatgaagcaaactttagctggcatttccgcgataaggttagcacatggatcaccaatgataaccgtcctctggtggtttatccggaaaccctgtatactctggttactgatagcgcgtctcctgcgtcaacgattcgtgtaaaccatgaagtttgggacaaaggaacagttactatctacttgaataatatcaagtttactggttttacgaagtacacaaacggtgttctgttgtatcgctcaggtggtaggataattggattctatgaactgtcataccgcgcaagggatgaactcactattttctggaaacccgataacactttaatggtggcaagtctggttaatcaggaacgcgaaaacccatatacgccggatattgaacctggattaatcgaccctgatctgagtcacatgatcactcgttttgctccgcaaagctatctggacaaccaacagttcgagaaatttggtgaatactatctgcaatacatttcgttgggaagcaacagttactataacaaattgctgaacctcatccggaacaagtatccgagagagaaaaacaacgtcgaatatttgtggtctgaaattaaccgccgtaacatttacctggataaaaccaaacgtgaggcagtagttagatttttcgaatcacgtgcaagcgatttctattcaacaaaagggattgaggcaagttatacgttcctgtttaaattgctgtataacgaagatgtttccgttgagatcgaaagctccaacagtctcgaatatgatattttggttagttcaacaaatatcagccaggatatcgtaggccggacgatctatacaccaactggacgcgctaacgttacatacatcgaacgtgactatgaaaatggtcaattgcgttggtcaatgactctgcataatgctcaaggtaactttatcgaagggcaggttgtcaagtcagaaaaaaccaatttcaccggaatggtaattcgtggtgttcgcggtaaacaaatggctaacaactcgatcgactatatcaaccgtggacgatcttactatgtgatgaaaattcgttcaaatctaccgacttcccgttataaggatgacgtattgaggtttgttcatccggtaggattcggctttatgggtattacgatgttaacagtattcatcaactctggtttgtcaatgactcataacgagacaatcattgatattctgagaaactaccgcttcgatagtggttatcctaagttctggcctgatcgcattgcgagtatggacggtaacggaaaccaacaattcgacctggttactggtgaacctctgtacaccgtacacccgcgagcgggggaaccttttgatgtacctccggaatatgacattgaagaaaaaccgcttaacggtgttcttccttctgcgcgacggttcgatcaaagtccgttgttcgattgctcaggcgttaaatattcacagttccgtaatttggtggataaacgactgaaagatgatgcaggaaacccacgtgatccaaatcctccatcacagattaaggtaggaaattaaatggcacaacaaaacttgtatcggtcggtaattactgcaaaattccgaaccgaaaacttgatgaacttcaaagatatgatcggcgatgccgccgatctaaacacgatttacatgtctattggacgaactgaatcgtggtcggataacgaatccgaccctaacttcgccccgccatatccaaatgatagcaccgatggtgttagtgatatgtggacgcatatgatcggggctactaaagttcctggtgatatgatagatgcaattttaccacgtaaagactggggtgatactcgttatccaaacccgaaaatcttttactttaacgatattgttgttgtaaacaccgcaccttataaccgtactgatccgggtaaaggttggatggtttatcgtgtggttgatgttcctgatatcggttcttgctccatttcgagcattaccggaaaacttgaatgtatcaggatcggcggtatctggagtccgtctcatgaatctagtgaacctccacgcggagaagctaacgggatcgacatgggagacggttataaatgggaatacctctacacaatcccgccagatgtcgtgatcaaccgctgtacaaatgaacatatcgtagttcctttccctggcgaactggaagaggatccggtacgttggggttatgataacgtgattcaatggtatccaggacaatacgatctagtgtatcggttgaaggtgaattcaatgcgttttcgtgcatacatggattctcttttcttcccgcaatctacgcttcctggtaacaaagggttccgtcagataagtattattgtaaacccgttgattaaaaaggcaagcccgaccgagcctgaaaagaaagcaactggtgattactataatgctaacgcgcttgaacctgattccggacgtatgatttacatggaaaacagacaacctattattcgctcccttgatcagactgaggaagtgagtattgtattcgaattctaaggaaaaacaatggcttaccaaacagcaaaaaaactaattgatgtcggtgaaatcggcaacccatcaacaggcgacccgctttatgatggtggtgttaaactgaacgaaatgatcaccaacgtttataatgcgtttggtgatgtgcgtatgctgtctgcaaacgaaggtgtcggtaacatggtgatccatgctaccggatactatcagaaactaccacgcacttactattcaagcacaccgatcgaactgggttccctgcatgacatagatacttcaacaggttcgattaccgttgttcttccttctggtaaggttggcgaaggttgctacttcataaatagtacgggtagtgtctctgttgatcgtcctatcgcgtttcgtcctcaagttggggatactatcgcgggggttgcagaccagttgtatatcacgtcaccttacacctttgtaaaaatctggtgtaccaaaaaagaaggtgcggtaacaaaatgggattattctgtagaatctatgttcggttctaaaacgatgcctgttgacactacggcgcttgtactgaaagcaaacccgactgctattcctatgttcggatatagcgaatttagcggggctaaggtgcttgtatacgcagaaaacttagctggtacagttaccaaaatggcagaagttttaatgaccgtggatcgtgtacacaaaacgatttattcaacggaatacgctattttgaaaaacagtgaagatgaaatgtttacattaaactttactgtcggtgctggtgatgttgtatacgctaacgtgcaagcgatcaaagaagatcgaattaaattcacgattaaagcaatagatacgattaaatcagggatcgcgtcatgaaacaagaaattttaataggtcagattgtagacgatggtacaggcgattacctgcgtcgaggtggtcaaaagactaacagcaactttacagaattgtataacatgctgggggatggtgagatcccccatccagcaggtgcctggaaaacttttgcgggtacgacgctatcaccaaaatttggtgaatcatgggcgttgaataccagtgcaaacaaaatcaccgtaaacctcccgaaaggcggcgtaggcgattataacaaggttattcgtctgcgtgatgtgtggtcgcgttgggctaccaacaacgttagactgatccccgcaactggtgatactatcaaaggttccccaactcctaaagatctgtttaaagattttatggatgtggaactggtgtattgttctccgggccgttgggaatacgtcgaaaacaaacagattgacaaaatcacaacttcggatctggcaacagtagcaaaagaaacgtatattgctactcagggacaaactgacttccctaacgtattcggtgttggtaatgaatacaacctgcaatcgttcgaagtttactatcgcggtaacttgctgttcatcgatgagaaagacggattcaatgctgataactcagactatggatcgattggttctgctcctggtgaactggttgcacttgatggtaattcagtacgtcttaaaaacccgtgtaacgctggtgacacgcttcaatttgttacctatctagatgggttagcaacatggcgttcgagctatgaagcgtatgtgatgcgcatgtatcagactggtgatacttctctggaaaccgttcctggtgaacagtgggtaggtgatctggcaaccaaaaaagagtttacacctgctgaatttggtgttaaccctcgcgtgttgattaaccctaactcgtttgaactgcttctcaacggtaaacaactggttaaaggcggtgacgctgactatccggcgttttcctgtgaaggtgcggaaggtgttgatgaaagtacgtgtgttggtaactctggtgtatgggttccgtcaggacaggattatagtttagtattcactgattctgtagtgacttcaatcaagtttgctcaggaactggaatccggcgacgttgtaacgatccgttggtttaacaatgatattggtactctgatggattgggaaggaactggcggtattaaagaaaaagctgataaggtttatctcaataacgaagaagaagttatattgacgaaccgtatcgaatataccgattataataacccttctcagaaaacaatgcgtaatacaggggaaacctatcagggacgtattctggatattcaggctatgtttgatattatccacccgatcggaaccatctatgaaaacgcacacaacccggcaaaccctgctgattatatgggatttggtggttggaaacgttacgcagaaggttatttcctggctggctggacatcaaatgcagcggatcctgatttcgcattaaacaataatgatttagatagtggtggtcaaccgagtcatacggcaggtggtacaggcggtgatcgtggtacagaaatcaaaatcatcaacgttcctgaacttgtatcaaaagataaagttctgattgctgatgaaaatggtgctgtgatcattggtggttgtcagttagatcctgatgcttctggccctggatacactaaataccgtgaggatacattgaaagtgaatcatggtaacacattacctgataaaatcaaaactattccaccgtatatgactgcacatcgctggataagggttgcataatggcttacaacaatatttcaaaaacaagggagggcgctcgcgtcctctctaaagaagcagattacttacagtatgatacttatggtaagttgcctctgatcggcggtaaacgttcgatcggcgaaccaaacattgaccaaacaaaacgcggtgttctgtatggaaacgtacaatccgcaattgatgacctgtatacgcttatcgagcaaatcccgattaacggcgttgttaccatgactgaggatgcccctccaatcgctgtacagcaggttgagagcgtttcttttgatggtattgtacagaacatcgattcagaccaagaacaggctgtagttcacgtgtacggctttcctttcatctttgataatgggactaacgccgcaactgtttgtgaaacggcatacaacaaatttactgaattcgttgcagcggaaaaatatttcgcagaagttaaccgtaaaggtgttgatggtacgatcctagaatgtcgatttattgatagtgttccgcacccggcaacaaatatctcagaaaacggtattcgtcaaatcggaactatcgacgtagccgcaaaaagtggctatggttcatgggttaagttgggttctggtttcttacctgatgttactccgcaagtaaccgtgtattacttcaaacgaattgcataaggataacacatgagtaacaatacaatcaaccacgtaagtgataaatccatttacgtgacatttgacccaacaggtactgattggcctgataccataaccaacgtacaagatgcgttggaaaaaataggtagttgggcgcgtactgatactgggcttcctatcgcaacaacttctgttcgtggtattgctcagatcgcaaccgaagctgatattgacgctggcacggataacactaagattgttactccgaaactgttagcatatcgtatgcagaaccctaaagcatcacaaaccgtatggggttatacgaagtattcgactgatgcggaatctacaaccgtaactaacgatgcatcgtctattactccgcgatctctgaactatgtgttcaataaccgtaaaggtacagaatcggtttggggttcttctaaaattgctaccactgcacaggcggttgctggtacagataacactgtaactatgactccgcttaaagtcaagcaagcgatcgcgtccctggttcctgttcagtcaagcgcgaccgaaagctcgcaaggtttggtacaactggcaacagttgcacaggttcaggctggtacgatccgtgaagggtatgcaatttcaccttatacgtttattcgtttaactgcaactgaaagcaacctgggcgttattcgtatcgcatcacaggcagaagcaaacgcgggtactgatgacaccaaagcgattactgcgaaaaaattaatcaatacccgtgcaactggatctcagttcggtgttgtcaaattagcaacaactgttggttatgtggcaaacactgcactttcttcaaacgctgctgtattacctagtgatcgaaatgcggtaattaacggttctctttatgagaatagcgcaatatataacaacaaatatcagacgtggacagatcttgattggcatttcccagtaggtgctattgtcatgactggttttcagactgaccacggtagtttgtatatttgtgatggtcgctcactgaataaaaataactatccgttactttttgagcgtataggttatacatttggtggtggcggtgattggtttaaccttccagattgtcgaggcgttgcagtacgtggtcatgaccgtggacgcggattaaaccctaatcgtgggtatggtacatatgaaggcgatatgttgggctggcacgaacacccattacagcttatctaccagaacggcggtaatattccgaaatggcaagcagtttatgaacttaaaagcgccgagaaaaacgatcagagtgctcgcgtgtttgattcttccataactaaagctactggtgtgggcggagaagaaacccgcatgaaaaacatcgcattaaactacgtaattcgcgtattataacagaggttattaaatgatcatcgacaaattaaacccgttgccgaagatcccgtttgttgatggcgtcccagatgacgccacgactcaaacgaagattatttggatcaaaaacggtgaaactctggacggttcgccagataaagtgtcaaacactggtagtcttaaccgaactggtgtaaacatccagcagaacgcggttcagttagaacaaaataccatcacccataatgataaaatcaacgaagtaatcgatcaggttaacttgattactgaaaacattgatgctattggtgatgagagcgtaatcaaaaaagttaaccagttggatcaggatgttcaggcattaactttatctaacacccaaacacagaacaaggtagcacagttaaccctttctgtaaatgctcagaacgatgaaattggggaatacgatccagaaaaggatcctaaacaccgcacaattcgtaatgatatcatttacattaagaaagaagttggttcatatcctggatttaacgttgatggtgatgttgacccctcttctactggtactggccttaaataccgcgtactgagtaaccaacgtgctatttctatgcaggaaactcgcataaccaaactggaagatgattgggcgctttccgaagtaggacaactgacagaagaggtaaaagaacttcgtgctgaaatgggtgattctggtcttgccacaacccgatcaatctatgcgcgaattaagatccttgaggatggttctgttgtaatgcaaaatgaacttgatgcgattaatagttatataggacgcacgtcaggttcaaccagttccattaacgatcgtgtgaacagtctggaaaactccgttagttctctggctacacaaatcaacgatccggtaactggtatcactgcacaaattgcaaccatcaatggtcaaatcggtacggtttctgttcagggtagtatccgttatgatattgcggaaaacaaacgcagattgatggatatggaaatgattctgggtgaatccggtgatgaaggattgcagggacaagttgcgatcttaactggtgacattggcgaagattcagatcctaccagtatcaaaggccgtttgagtgttgttgaaggtgaattacgcaccaacactagcgcactctgggaactgcaaggcgttgtaggtaactcttctagtggcctcgttgcaactagccagcaggttaacaaagaaatctatggcgatggtgttagttccgatcctgttactcgcgctggtttgaaaacgacaacccgcaacctgttcactcaggtaggcgataacgcagaaggtaacgaaacaggcatttatgcactgattgccgaccttaataaacgtgttgaggatttagaagcgttgaacattgcacaggcacttgcagatcgcgtaactatcgaagatctgaatgctaaactggctctgtacatcaaagaagctgacgcagatctccgttatgagagcaaaaacccgcctctgtcattcggtactaacctaactggtgatactgaatacactactggcgatccattgtctctaagcgtaactatgaatggtggtgtttctccgctgtcttaccagtggacgaaaaacggtgtaaacgttggcacaaactccaacacatttaccatcgattcgctacagccttctgattccggaacttacaaagtaacggtaactgatgcaagccataaagtcatcgtttctgatgaactggcgatcactgtcgcttaacgattaacaaggggcttcggccccttttgaggatctttatgattacgaacaacccagcacaattaaaagatgaaattctgcgccgtttaggtgctccgatcgtcaaaatcgaagtgacaaccgatcaggtttatgactgtattcaacgagcattagacctatatgcagaatatcattacaatggatctaacaaagggtatatcattcttaccctggggccggacaacccgaaaaacattttcgatctgagtaaagaacacattttcgcaattactaaagtgttgcgtactaacatgggttcccttgtatcgatggatggtactgcggtttatccgtggtttactgatttcctgatgggccttactggtggttctctgggcggtggtggttgtgcatcacgtacctacggaatgaacgcatacggcgcggatatgggctattttacccagatgatgagctatcagcggtcaatgcaagatctcctgtctccgcttccggattactggtataacgacgacacaggacagtttgcagtatacggaaccgttaaagatggtgatattgttgttatcgaagcaatgatcagatcctttgttgatgtacccagtatggtcggtaacgtctctggatacgctacagcgggttctgatggcgaagataagccaactatagcagatatatacaataacccctacaaagctgtctcaggcggcgtgaaggctggtcaaggtacaagcgttcagagttcatcctctgcgtataacaaccgttgggtgaaagattacgcaactgctcttgttaaagaggtaaacggtcaggtgctggctaagtttcagggtatgcaattgcctggtggtgttgctccggatggaacccgactgattcaggaagctatgcaagaaaaagaaaacctccgtcaagaacttctgttactgtctgatgcacttccagtgttgatgatgtaaggaggaaaaatgcaaaattgggatgaaagtctgtttgcacagttagaagatggttccggcgtcgatcggaacctaagacaagaagtaacaaacccgtatgttaactggtacaagtataaccctactcaacagttgcatgattcactaacagccgaagcaattcaaatgaaatctccggatatgtattacgtccgtcgagaatttgttaatattgataaaattttgggcgaagaccgtgaatcgaagtttacaaaatcgtggaaaattgcagcatacatcgattcgtatgcaaactacgaaggacagagagacttttacagcaaatttggtatgatgtcaaacgatgaaatgacacttgtgatcaatcctcgtttatttgcacatcaaactgatggcgggatccctgttctgggggatttgatttatttccctatggataacagcctgtttgaaattacatggattgagtttgacccgttcttccagttcggcgatcgtcctcaacgtaaaatcaacctcgttaaatttatctatactggtgaagaattggatcctaaactgcaacgaaatgaagggattaatcttgctcccgatgctgatctggatctcgaacctattcgaaatcttgatggattggctgataccaatattgaacagtacgaagaagatcaagcctttgaagatgaaggcgatgaattcattgaatcgtttgatgttgttaacgggcgcggatcaccgttcgcacagttcccataaatataaccaggggaaaccctatacatgtaagggtataggagaaatcttatacccgctttaacccatacaggaaaaagaaaatgtttggctactggtataatagttcgctgcgaaattatattgtcttgatgggttgtcttttcaatcacgtgcaagttaaacgcattcgcggcgaacaagaaaaatttatcaaggttccgattacctacgcatcaaaagaaaaattcctggcatccatgaacaagctgaactatgcatacagtcaggaaaatgttgctaaaacggaaacaattttaccacgtatgaatctatccctcgttgatttgcagtataacgcaattcgtaaaacggggatcgcggtaaaccaaaaaatgacgcagttacgcgcacctggaaaaacagtaactcagtttaaccctgctccgtatcgtctcatgttcgaactgggagtgtatacccgttacgaagatgatgtgtttcagattatcgaacaaatactgccatacttccagccgcatttcaactgtcgtattacagaattacataaaaacgacattaaaatagaccgagatattaaaatatctctgcaatctgtttcccctgatacatcatttgaaggtgatgcaacgacacggcgacacattgaatggtctttaatgtttgaattacagggctacctatatccgcctgttaacgagattaaaggcgagatcagaacagtatacacggatttcttttccaatatgaacccgttggacaaagataattttgaatccgttgatgctcaggtggatccggttgatatgcctatacaggattacacgggagaagaatacattcaaacgtatgctaatgatatcccaattcctagcggtgatcaacctcctaaaccgaggggccaataatggaagaatttagcgtaaaacaactacttgatcttgaaaatctccctggtgctgaaactggggaagaaatggttgtatatgaaaaactcgaactcgttgatgtcgagtcacacccagcagatcgaaaacctgatttagaggaagactatgcacttgcgcgtaaaaccgcgcattacatgaatcagatgatcatggatatggcacaaattgccttgcataacgctaaaaactctgaatctccgagacacgttgaagtttttacaaccctgatgaatcagttaaacaattctaaccagggattgatgaaaattcataaagaaatgcgagaaattaccgaagaaacaacaaaaccaggatctgaaaaaggtaatggcggcggtaatgaaatgaacatagagaatgcaactgtatttgttggttcccctacggaattaatgcagaaatatggtagtgcatacgaaccaaaagaaggcttcattaatggtgaagcggtagaggtaaaccctgatggaaatggaaccgacgatcgatccgagtaaggaatcagatcacccaatcggattaatgcatcccgattatctgaaaaagaaaattgatgaatttgggatggagtggacgcaaagcgaacatgataaaaaatggtatccgacaaagtttagtgattacctaaaaattaacggtatccataaagttgatattcaagcaaaagacagttcaaactttgcgacttataaaaacaaaggaaacaagaaaactcgatataacggaaacccaaacctgaaacgcgcgtacatccaaacgaaatggacgcaacagatgttgatggagtgggttaagtgtcgtgacgatattgtttattttgctgaaacatattgcgcgatcacccatattgactatggtacaattaaggttcagttgcgtgactatcagcgcgaaatgctgatcgaaatgcataaaaaccgtatggttgcctgtaacctgtctcgccagttgggtaaaacaaccgttgttgctatcttccttgcacactttgtgtgtttcaacgaggataaatatgttggcgttttggctcataaagcctctatgtctgcggaagttctggatcgtacaaaacaggcgattgaacttctccccgatttcttgcaacctggtatcgttgaatggaacaaaggttctattgaacttgataacaaatgtaaaattggtgcgtttgcatcttctcccgatgcggtgcgtggtaactccttcgcaatgatctacattgacgaatgtgcgtttattccaaactttattgatgcgtggttagcgattcagccagtaatttcttctggtcgtaaatcgaaaatccttatcacaacgacacctaacgggcttaaccacttctatgatatctggaacgctgctatagaagggaaatccggcttcgtaccatacacggcgatctggacatcggttaaagagcgtttgtatacagacggtgatgatggcgtatttgatgacggctattcatggtcttcgaagatgatcgccagttcaagtaaagaagcatttttacaggaacattgtgctgaattcatgggaaccaacggaaccctgatcgctggctggaaattgtcaaaactctcatgggttgatactgatgaaacggaaactaatttttatcagtataaagctcctgtagagggacataaatatattgcggtactcgacccagccgaagggcgcggtcaagactatcacgcgatgcatattatagatattacatctatgccgtttgaacaggttgctgtataccattcaaacaaaacatcgcaccttattttgcctgatgtcctgttacgttatcttatgatgtacaacgaagcatgggtttatatcgagctaaatagcacaggtcactcagtggctaaatctttgttttctgagttggattacgataacgttatttgtgatagctataatgatttggggatgaaacagagtaaacgatcgaaagcgattggctgctccaccctaaaagacttgatagagaaagataaactcatcataaataacaaaaagacaatacttgaatttcgtactttctcagaaaaaggtgtttcgtgggctgcggaagaaggtttccatgacgatctcgttatggcgctggtttgctttgcatggctaacaacacaaatgaaattcgcagaattttgcgagaaagacgatttgcggttggcaaatgaggtattcgcacgtgagcgcgaactgctttatgaagatatgttatgtcctgttatcgtaacgagtggcgacgaaacaatatctgtcggccaacacggtatttcgtttatataaatttagaggaaacttaataatggctttaatctctccaggcattgaaactaaagaaacatcggtacaatctaccgttgttcgaaattcaactggtcgtgctgctattgttggtaaattttcatgggggccagcttaccagatccgtcagatttctaacgaagtcgaactggtaaattattttggctccccagacaatgacaccgctgattatttcatgaacgctgtaaactttttacagttcggtcaggatctgcgtgttgttcgtgtcgtcgataaagaagccgcaaaaaacgcaaccgcgatctataatcagatcaaaaccacgatcaccgctgctggttctaactatgcagtagacgatcaaatcaaagttaaacacaataacgttgttattgaagaagatggcgttgttaccagtgttgatgatcagggtaaaatcctgtctgtgttcattccgagcactaagatcatcgcacacgctaaacaggttggtgtgtatccggatctgtctagtggctggactacagaaatcatttccagttcttctggtgtttctgctacgattacaatcgacggcgtagaagttgatccgggtattactctgctcaaccttgacaccgcaaaagaaactattcaggcaactgatttccaggaactttgcaccaaataccagctaccgtctgttattgcaatttatcctggcgaaatgggtagcaccgtaacggttgaaattctgtctaaagctgcatacgattcttcggctgtcattaagtcttatccttctggtaagtctggtaaaaacagcggtcgtagttcgatgaactttggccctcagaatgataaccaatacgcgtttatcgttcgccgtggtggtattatccaagaaacgtttatcgtgtcaaccgctaaaggtgataaagatatctacggttcaacgatctacatggatgatttctttgcaaacggtggttctcagtatctgtatggtacgtccctaaactggcctgtcggattctccggcgttctggaactgggcggcggtacttctgcaaacgccactgtaggcgctgatgaactcatggctggttgggatatgttcgcagatcgtgaatctctgcatgttcctctgctgattgcgggtgcttgtgctggcgaaactgccgaaatttcgtctactgtacagaaacacgctgtgtctatcggtgaaacccgttcagattgcgtcgtattcgtttctccgccgcgttctgctctggttaatatcccactggctcaggccgttgataacctcgtagaatggcgtacaggctacaaaatcggtaatactaccccagttgataacaacatgaacgtaagttcaagttatgcgttcatcgacggtaactataagttccagtatgataaatacaacgatgttaaccgttggatcccgctcgcgggtgatatggctggcctctgtgtttataccgatcaggtatcgcaaccgtggatgtctccggctggctacaaccgtggtcaactgcgtaactgcatcaaactggctatcgaaccgactaacgcgcatcgcgattctatgtaccaggtacagattaacgcggttactggtttctctggtggtgctggatacattctgtacggtgataaaaccgcaacgactgttccaagcccgtttgaccgtatcaacgttcgtcgcttgttcaacatgatcaagaaagacatcggcgataacgcgaaatataaactgttcgagaataacgatgatttcactcgttcttccttccgtatggatgcaggacagtatatgtctaacgttcgcgccctgggcggtgtatacgattaccgtgtggtttgtgacactacgaacaacacgccggatgttattgatcgcaatgagtttgttgcatcaatctacgtcaaaccagcacgttctatcaactacatcacactgaacttcgtagcaacctcaactggtgcggatttcgatgagttgattggatcaacgtcagtataacatgtaaggggctgaaaagcccctataaatacacatagaggttagaaaatgcttactgatattgtacgcgcctttgaatccggtgatttcgcacgtccgaacctgttcgaagtagagatcccgtatctgggcaaaaactttaaattaaaatgtaaagccgctactatgccagcgtctaccgttgaaaaagttccggtaggttacatgaaccgcaaaattaacgttgctggtgaccgtacctatgatgactggacaatcacggtatataacgacgatgcacacacaacccgtgatgcaatcgtagcatggtcaaacatgctgcatggtatgggtgaagacattacaggggatatccctgcaaactacaaaaaaaccgctacggttaaacagaaaaaccgtaacgacgaagtaaccgccgaacataccatttatggcctgttcccgaccaacgttggtgaggttactttagactgggatagcaacaacgaagtgagcactttcgagtgtactttcgcgctagactggtgggtttaaacgctataaatacaggggtagcaataccccttatcattatttttcggagttgtaaatgaacttttttggattagacaatgtgttagggtttttcaaaaatttcgccaaacaggatgaaatggaatttgaagcccaattaaaagatgatacaggttcgattgcgcctccgaaaaataacgatggggcgcacgaaattgaaacggacttgtcaaatcagcgttattcttctgtgttccaacagttctattccggacaggatccgcgaattcagaacaaaacacagctaataaatacataccgtggtatcatgacatatccggaagtggaaaacgctgtttctgaaatcattaacgaagcgattgttaatgaacaaggaaaagatattgttacgatggatctttctaaaactacttttagtaagaatatccaagataagatcatggacgaacttgataccgtaatgaatattcacgatttcgataaccgaggctctcgtttattccgtgattggtatgttgattcgcgtatctatttccataaaatcatgcataaaaatgaatctgatggtatcaaagaattacgccagttagatcctcgttgcatggaactgatcagagaatcagttacagaaaccctacccggtggggttaaaattttccgtggctatcgggaatacttcgtatacaccgcaccaaaaaacggttatagctacaacggacagatttatagtcacaacgacaaggtaaaaattcctcgctctgcgattgtttacgctcatagcggccttgaagattgcgacaacaacattataggctacctgcaccgcgcggtcaagccagctaaccagttacgtttgctggaagatgctatggtgatttaccgtattacccgtgcgccggaacgtcgtgtgttctatatcgacgtaggtcagatgggtggccctaaagctacacagtatgtaaataacattgcgcagggcttaaaaaaccgtgttgtatatgacgcgagcactggtaaagttaagaatcagcaaaataacctgtcaatgacagaggactattggctgatgcgtcgtgatggtaaagcagttaccgaagtttcaacgcttcctggtggcactgccttctctgatatcgacgatgttaaatggtttaaccgtaagctgtatgaagcgttacgtattccgttaagccgtatgcctcgcgatgatggcggtatccagttgggtaacgatggcggtattacccgcgacgaattgaactttagcaaatttattcgcgaattgcaaattcaattcaaccctgttcttgcggatccgttaaaaactaacttgatcgcgaagaaaatcattacagaagatgaatgggatgaaaacgtaagtaagattgcttttgtatatcagcaagattcttactattccgaaatcaaagatattgagattttggaacgccgtttaaatctgatgggccaacttgaaggggtggtcggcaaatatgtatcccataaatacgtaatgaaagaagttctccggatgtctgatgaggaaattcaaagcgaagccaaacagatagaagaagaatcaaaagaagaacgttttaaaaatccagaagcggaagaggaaaacttttgatgaaagaatttatcgaagcaatcaaaagcggtaatctggtggaagctaaaaaaactttttactccatcatggaagaccgcaaagaagcgcttcgtcacgaattgcgcgttgaacttgccgaagctgtacgcatcgaaggcgaagaagacaaagaaaaagacgacgaaggcgctgataaagatgacgaaaacggcgataaaaagccagccgaggatgataaatccgaaaaagatgatgagtgaggtgtgtaatgcaacttgacatcgaaatcaccgccgaagatctccaggaacatttagacgaagcgaaagcccgtgtagatattctgggtatcgatgaaggcacggttaaaatcatcgaaaatttggcggtcaccgaaccaaatttagcccttgctatgatggcggttgttgaaggtttaacacttgatgaggtaattgtcaagcatgttgattcccgtggcaacgtagaacgcctcaaagacaggaaaacccgtgagcgtaatgcgtatcagactaccggattaaccaaatcccaacgtcgtcagatcgcgcgtcgtgctctcaaaacaaaacgtgctaacccgtcaattgctactcgcgcacaacgtaagcgcaagaaagcattgcgtaaacgtgctgcactggggctataaatatgaatgaatcccaaatcaacgaaaacggcgacatgcttttaatcgaagaatggggtttaccttgcggtgacgtttcagaatctattttagaatctgttggggaatcaaaagacggtaaattgcggatcgaaggtattttccttcaagccgaaaaggttaaccgtaaccgtcgtttgtatcctaaaaacgtacttgaagaagcagttaacgattatattagaactcaagttaacacccgtcaagcattaggtgaaatgaatcaccctccgcgtccgaatgtggatccgcgaaatgcttgcatcctgattgaaaaattatggtggaagggtaacgatgtttggggccgcgctgttgttgttgaaggcgacggtggtgatggtgacaaactggcggcgttgattcgtgctggttgggttcctggtgtttcttcccgtggattaggtaagctctccgattccggcaaaggctacggcgttgtacaaaagggctttaaattagctgtaggcgttgatgtcgtctgggggccaagcgcacctgatgcatatgttaagcctatagtggaaaatcagcaaagcaaaccgcttgttgagaataatagtgctgatgacgcatttcgggcattgtccgagcgtttgaaaggtctataaatacattaaacaaaacaacaggaaaatcaaaaatgcttaaagaacaactgctggcggaagcccagaacctggatactccggtcgagttagacagcattttcgaatcagttgaactttctgatgacgtgaaagcgacattcaccactgtattcgaacaagctgtaaaagctggcgctgcaaaactcgctgaatcccacattacccagatcgctgaacgttccgacgaactggtcgaagctcaggtaactgaacgtgccgctgaaatcgaaactaagctgtacgaagatgctgataaatattttgcgcacatttccgaagaatggctgaaagaaaacaaagaagccgtttcccgtgacatcaaagccgacctgtttgaatccctgatcatgggcctcaaagaagttctggttgaacataacgttgtcattccggaagaacaggttgatgtagtcgccgaactggaagacgaactgactgagaatcagcaggaagttaaaaccctgtttgaagcgaatcaggaactgaccaaagaaatttcagaaatgaaacgcaatgcagtagtttcagagaaaactaaaggtttgaccgaatctcaggtcgaaaaagtagaatctctgattgaagggctggaatattccgcaaccttcgaaaataaactcagcgcaattgttgaaatggtagcaaccaaagctgaaaaacccgttgacgagtctgtaaatactccgcaaacgaaagatgactttgttccggtagttgaaagtgttccggcagagaaatccaagatcaataaatatgtacaagcggcaaaagccctttcttaatttcaaaaggtaagaaacaatgtctaagaaaaacgaattgatggaaaaatggaacgatcttctggagtctcaggaaggcttaccggatatcgctaccaaatccaaaaaacaactgattgctgccattatggaagcacaggaaaaagacgcagaagttgatccggtttaccgcgacgagaaaatcgttgaatccttcggtggtttcctggcggaagctgaaattgctggtgaccacggttacgacgcaaccaaaatcgcttctggtaactcaagcggtgctatcaccaacatcggccctgctgtaatcggtatggttcgccgtgcgattcctaacctgatcgcgttcgatatctgcggtgttcagccgatgactggccctactggtcaggtgttcgctctccgcgcagtgtacggtaaagatccgctggcttccggtgctaaagaagcattccatccgatgttctctccggatagcatgtactccggtcagggcgcggctccgagcaacggctttaccgaactggcttccggtactgcgatcgctgacggcgctatcgtgttccacgatttcgttgaaactggtcgtgtgttcctccagaacgtttctggctctccggttactgtaactggttctaccgccgatgctctggatgctgctgttatcgccgaacaggaaaaaggtactctggctgaaatttcttacggtatggctaccagtgtagcagaactgcaagaacagttcaacggttctactggcaacccgtggaacgaaatgggcttccgtatcgataagcaggttatcgaagcacgtagccgccaactgaaagcacagtactctgtagaactggctcaggatctccgcgctgttcacggtatggacgctgacgccgaactgtctgctattctggcaaccgaaatcatgctggaaatcaaccgcgaaatcgttgacatgatcaactataccgcacaggttggtaaaactggtttcactcagaccgttggctctaaagctggtgcgtttgacttccaggatccgattgatgttcgtggcgctcgttgggctggtgaaagctacaaagctctgctgattcagatcgacaaagaagcaaacgaaatcgcacgtcaaactggtcgtggtgctggtaacttcatcatcgcttcccgtaacgtggtttccgctctggctcgtatcgatagcggtatcactccggcaggtcaaggtctccagaagactctgaacgttgacaccactaaagcagtattcgctggtgttctgggtggcgtgtataaagtatacatcgaccagtatgcacgtggtgattacttcaccgtgggttacaaaggcgataacgaaatggatgctggtatctactacgctccgtatgttgcgctgaccccgctgcgtggttctgatccgaagaacttccagccagtaatgggcttcaaaactcgttacggtgtaggtatcaacccgtttgcgaactctcgctctcaggctccgtccgaccgtatcacttctggtatgattaccaaagaaatgttcggtaaaaacgcatacttccgcaaggtttatgtgaaagggctgtaatagccaacttttccaagagggaaccgcaaggttcccttttttattacataaataaagaaaagtttgtcaataacgcaggaacataaaatgagtgaaaaattttacacaattaacaagctggtgcgtcagtcacagctaccgcctggcctgtctaaaaaggttcttgatgaggcaaccggaacagaaacaattaacgtagctaatacccgtccggatctggtatctcttacccgtgcggtaaacaacctgatctacggtgaacttgtagcgattcaggaaactaatttacctaccgcaactctgttcggtgtgcgttatcgtaaccctaaaggcgatatgacgttttccagcgctgctacatattccggtaagtatgcaagccgcgataatatttcaaatggtgcggttggtactgcctacaccaaaggccaagttttcaaacacccgacaagtgatgttgtatacgaagtaactgatagcgtaactctcgcaggtgctgatattgatgaagcgattatggtcgcattattcagcaataaattacgcctggcaagcgaagccgcgccaacaagtcaatatgaaaccagcgaagatattagtacaacttctttcgaaatggatcgttggaatatcaacgttcgttcccgcaaattcaaaactgaaatgaccgtggaacttatgcaggatctggaagcaaaccaattcaacgcagaaaatgtgattgaagatgttttgggtactgttgccagtgaagaagtaaacaaagatatcattcagactctgatcaacgtatcaaatcgttacaacgttgatggtgtggtcacaaatggcattttcgatgctacaaccgcatacactgcaaaggatgctccggctttaggtcgtttcctgtatcaattagtgtgtgaaatggggcaggaaatgaatagaacgacttcatttgaagctacctatgtcctggcctcttctcgcgttgtaggcgttctggctgcgtctggttggatgcatgaaactgatgaaacccacccgttagcaacaggtcgacttaaaaacggttattatgtctatactgacaccaatacaccgtttgattacctgctgactggttgcaagtacgatctgggtgaaatggatcatgttggctctctgttctatacgccatacacagaagctgatcaggcaggttcgatcaagatttctgttgatcctcaatccttacagcctaaagttgctattctgatgcgctacggtttatcggttaacccgtataccactgctgctaatgaaagacttgtgaaaggtgatgactgggtaaacctctcaggcaaatctaaaatgagtcagattgttggtatcaaacttcctaaactgggttgatagtataacccaacggggataatattcaataggtggagtagggaaacttactccatcttttaataattattataattaatattaaattagatcttgaatttataaatgatttatgataaaatttattaattataattattatagatcaaataatttttgaaatcaagtaaaaataaatttgattttataaattagatcatgtataattattcttttaataatatattatattagatcaatttaaatttgactactaattaatatagtatattatagatcaactgggtaaattggtgagtatgttatgagtttgaaattagaagatctacaaaatgaacttgaaaaggatatgctgatagatcccctcaagttgcaatcagaatcagcggatatccctaagatttgggctaaatggcttcgttaccattcaaacgcgaagaaaaaactgatccaacttcatgctaaaaaagaagctgatgtgaaggatcgtatgttgtactacaccggaagacatgacaaagaaatgtgcgaagtggtgtatactgggactactgaaatcaaaatcgcgatcgctggggatccgaagattgtagaaaccaacaaactgatccagtattatgacatggtggtagatttcaccagtaaagcactggatatcgtcaaaaacaaaggatactctatcaaaaacatgttggagatccgtaaattagaaagtggtgcataatgtctactaaaaatgaaaaatgtgtagtgtgcaagtgtccggttccttctactggttatgtgactgaatccgggcgcgtgtgtagcactatctgtgctgactacatcgcagaaaaaacaaaaagcggcgagatcaacgaatccgatgatctgaatgaagttcaaatgttgctgtaggagaatcttatgattggatacggtgaaggaattacagatcgtgatgaacgtccggatctgttagaatctgacgaacatcctgatttttaggataggtaaaactatgccataggcatgacaaaccgattatgcgtaatgaatgaggcttgtacggggttctttgcctggatctcatagttccccattacggaggcaaaacgggcgatggaggcaacaaaatcgcgtcctaaatacatgtgtacccgaaaggggcttgataaaagaatgctggatgataggcgtactcttttgcgccgtccgatggagtttaccttcggcggggtgattgataatataccttcgatcaagggcatgtgaatagaatagccagaatagtacagcactggcgttaagcaaatgtacaaaagccccttcctttcggttggggcttctttttagaacttttcttcttctccgctttcgagttcggcctttaattcttcggctcgacctttcagcgcatcgcgcatagaaatatcgtctgacggcgcaacatcaacttcttttacacgatttttgtaatatttttcaagctctttaaggccgtccatagtacggcaagaggcgaccttgctcatgaaatcatcaatagccgcctcataaagtcgaaaatcgttgaaactcttcattttgacctctaaatttcgatttgtttgatcacgtagtcaaacttttcttcattgtaaatgcgtactcgttcgattgcgtgtttcataccatagtttttgtatgaatatttatttttagcatttttggactttgccagcgttgctaagttatcaaccaaatcccaaacagtagcaagagatttagaatcatgtttacgcagtacgcgcccaattgactgtttgactataacagcagatttgcaaggatgtccgaagatgatgtgatgcaggttcttgacagaaatacctgtactcagtacaccaatagaaccgattacgatcagccccttcgttgattccgcgatccgtttcatttcgtttcgctcatcaatccccgtttccccagaaatgtatacaacgttgtcatatacctttttgagttgctcatacagccatttaccatgtttgatctgattgaacatcacaaacacgttttcatctttttcccttgccagtttcaacgccagcttacagatccatgcgttacgcctggtatgcgatgttatatacttgatttcgctttggtaatcagcccccttcattttcttaatctcatcctctttatatctcatgaagatggtattaattcgaaggttggtaacttgaccttcctgcatcaaccgatttgtatcaactggcttgaagatttgaccaaaagcgccaatgtattgcatcatgtttgctttgccttctttcagagaaccagaaaggccaaacttgaaaatacactgatccattgtgttgatgatcttctgtatgctttgtccggttgatttgtggcattcatccaccatcaaacacatgaactgctgaaaccactcaggaggcattttaacagccgattgccacgtagacacgtagatcaatgcattactgtttttagcagttcctgaccgtattccaagcattgcctcgcgaggtaaaaggcgatagttgacgatatcaccgatcatctgatcaacaagggcagttgttgggacaatgattagtactttgcctgtgtaattttccagacaccaacgagatatcaacccctgaataagagatttacccgctgacgttgggaggttaagcacagcacggcggtttttaatcgcatgaaacaccgattgtttttgataccaatacggatcaatttgcttgtttccgtcgtatactgggtgttcttctaaccacttgtcaaaatctggctgggtaatttcttctgtttcgtggatcttaggatccatccagatagaatacccgcgagactccgcgaattttgttacaagataggctaaaccgtagggcagtttcccgttatagtccatcaagtatatgtagccgttccatccaccatatttgtattttgcctggtactgataacctggcggctggaagctgaaatagtcgcgcaattcatagactatgttagcctctgcctgaatctgcacatgactagtgttaaggaatttgacttcgatatccactatgtgtatcctatatacggtttatatgaatatttataggctaaataatgataaacattggagaactacaatgagtattgattacgaaaaggttgaaggtttcaaagccttagaacaaaaagaagccaaattacagcttgctacctacgcgcaagaaacgtttgatgtcaaactgaaccgtcagaagtcattcgaaaatatgcttgctgatctggaagctgccgtaccggaagaaaaaccggaactgttgatcgactcccctgatccggaaatggttacatacgaaggtgaaccatctgttcctgatgttgctccggaaattgccgaccagattgaaattgttcccgacgctctacaagctcctacaagcgattctgagacggtttctgatgaactggcatggatggaagggtttaccccgtctatcatcatgatgggccgctctgtttcgaatactggcttttatacgtgtccgtattggatctatgattggatgaaacaaaatccggattggtataagcaccctgatggttgtcctcattattcagcgcgtcaaaccctcaagtcactggcatggtacatgcaccgtgatgggatggttactgtacgcgaaaccagaaatagccagttcgacacgttcaaaaaataattttaaaaagtagttgaccttaccctgctgttcgagtatatttgtattcgaaggcgggggaatggctctcgcagtgaagaaggaaatacaaaatgaacatgatgaaaaatgcttactacccagttctgtttgtttgggctaatggtgaagttaagaaaatcgtcaattctaaagctccttattacactgtaggtgaagcacttcgccacgctgcggaagcaaattatcctgttcatgctgaacctggttatgctcgttggaacggttctaaatgggttgctgatacctgggacaactacgaagaagaaagaatggagtgtgatcctgattacgtatctcgtcaaatggaagctcatatgattgcagatcgtagactggataatgaagctcgcggattctattgattaacaaggggctacggccccttttcttttaggtgaaatatgaacttaaatcacgaatgtttaaaagatttgagcggattggtaacgttatttttcttgatatcgatggcgttctaaataatatgcggtgcatgaaatttggtgaacatatggacatcgaatgcgcacgacacttacgccggatagtgaatcacgctaattgtgatatcgttatttcctctacgtggagaatcggcaacagtacccataatctacgtgaaatattttatccgtggggattgtatcggatcattggtaaaacttgcactaacttccctcatagcactggaatgcgtggtgatgaaatcaaggcatggatcgatactttcggatgtaaaaactatctcattcttgatgatgacaccgatatgctttcttcacaaaaagatcattttattaaaactgatgggtttgttgggttgaccgaagaacaatccacttatgcgatccgtaacattttcggggttactactccgttttgtcctgaatgcaatgggtatggacgtgttaacggctacgacaaatgcggaacgtgtaacggtaaaatactccggctataaataccaataaacataaagaggttaaatttatggcaattccttctgtaacaattagcgccaacaaaaacgaacttttgattggcgaaactttgaccttagaggttgaaactactgaactagatccgggtgatgtgtttctggcctatcgttggcaaaaagatggtgtagatattccaggcgcaaccgccgatacttacacaactacggttgacggtacaactgctggcgattataccctgatcttaaaacacggtgctgatgaagaatcagcaacagaaaccacgtctgatacaatcaccgtgaccacttatccggtaatcgcatttggtactgatttacctgcaacaaaatctgttgttactggtaaagaacttaccctgactgttgcggtaactggcggtaaaaccccgtatacctatgtatggaaacgtggttctactgttgttagtggtgattctgcaaccttaacaattagcgcggctgcaagtggtgatgttggttcatatacggtagaagtgacggattcactgggtaacagaaaaacttctggtgcttgtgctgttagcgttacacctgctcttgcgtttgataaaaatctaagcccgaccgcttccgtaacacaggattctgcattgatccttagtgtaactgtattgggtggtacttctccttattcttatgcatggactaaggatgattctccggttggagacgatgcggatactcttacagtggcaagtgcggctctggatgatgcaggttcgtataaagttgtagtcactgatgcgaattcagataccatcacatcaactgtatgtgtcgtaactgttaatcaaaattatgatgatctcgtttctaaatggacggttcacccgattccgtggcgtgataccagctttaccccgatcggttattgggtacttgatgaaattctgtatcaaaaagcacagggtaaagattggaaaactgattatgctgattacaagtatagtgaggaagtacaaacgatcctgaaagcgttcatggaaaacggtgaatgtgagatccaggattcacgaaacggctatattcataaaatgagtgaaatctaagaggctttaaatggcaactgaaaaatggactacggttcatcctattccgtggagaaataccagttttacatatcttccatactggctatacgatattatcgttgatgcttttgagaaaggcgacgactggcgcgattatgcggaagaaaaatataaattagagtttgatactctgaaagaggcgtttgaagattatggtgatattcatgtaatcgaatctcgtaatggtaaactggttagtctgttgtcattgactcctgctcctgaaccagatcctgaccaataaaataaggcaaacaatgaatacacttctttttgatttcgacgacactttagcagaattttctcaggctttttatgataagttcggtgtacgtccggaaggaacgccaaaagaacgatatgacgaaatggcggcttctttggtgcgtactgatttttataaaaaccttccccgtattcaggctgggatcgacctccttcaatggagtttccaacgccgaatcggtgatcctgctactttgctgcttcgcgcggaagcggtcagccctctttgggttatgaaagaaaaactgaactatacagataagatttgcgctgaactggggatctctcgtctcgattttagtcgcattgactatccggaacagttcgcagaacacgcctatcgtggtgttctgatttcccgcaaccagaaacatcttgaaatctggaacaattctcatctagctaataaagttcctggtattttccttgcggaaacactggaagaaaatattcagctagtcacggaagcgcttgcaaaggctaatcaataacaaaaaagggaaccgcaatggttccctttcttttacaatctttttaattcatcaagcgctgttttcttatcaccaacaaagaggattgctttacctcctgcttttctgaaaggcaacaccgcttttgcccgatcgtcaaatagaattcctttaccagcgaatgctgctttttcatggctacttttaacgtagtggaattctggaacgtaacccaatactttttgcaatgctttacgtttttgttcggcaacaccgtcagaattgaatttaccgacactggttagtattgctacatcaccaagtgttcttaaatgatggaataattcaaatccttctttgattggttccagattttcgtagaaatcagttttggcaatttttgctttgcactttttcaactcatcttctgtcatcatagagggttcgccatacattggcacaaatgaaccttcccagtcgaacaatacaccatccatatcaaagaaaaacttattcatatcaattcctcagtttgtgtatgcatactataatgtttaatcattaatgtcaaccccaagtgtcagttttcggtgcgtatgctgcaactttagccacaatttccttatccagttcagctacagatttctgaggcttaccacgggctttaactttgatgtagtttgacttaacaacaaacatccctttgttacttgatttcttgatctcgctgtcaacaccaactttgttaaaactgatccaaatgtctccgtccatatactgtttaagagaatcacccatgttcaggatcttcgccatagtaagggccgcgccttcgtgggtatccatgagaatttctttaggaactacacgatcgcgtttctggttctgctgcatagcaatatgaacatcgttcataacccatacgatatgtacgttttctttcttgtatcccagcttttcgacatcacgcgcgatgcttgccagcttgctcatgccttttaacgttacgtcaaagatgaggttaggtttacgatcttctggtgctgccataataccggaataaacacggttttggtttttgttggaaatgttgaaaacgtcggcgatcacatgatggagggtagatacgttttctgggtttttgaggttcattgttttgacatcatggcccgtttgtttcttgatctctgctgcgagtttatcgctacccattacaagttttttcagggcgtcaacgtccagggtaataccttcgatgcctagcagtttttccagtgtgaaccctttaccggaaccagcaccgccagccagaataacaacctgaccgaacttaggataagcacggcccccgaaggtgatcagcgcttcggttaaggtgctttctgtgaattgtttaaatgacttcatgtaaaattctccagtttattttctattatttattgacatgctttctgacagtggtgtatggttactgtgttcgacggataggccggaagaactttaaaccataaggtatacgatatgaaaatcaatttacatcgcttcattgcagacttttcccgcgaccgcgacatggattctttcaactattactcccgtgagattgaagatcgttttgcggctcatgttggattccgtcgccaccatacccctaaaatgcgtcctgaccacgacccgaagtatagccctattatgtggcaagcccctatcgatggttacgttgaagggatccggatcatgacgtttaacgcgatgtatggaaacgctttgatccatatcgcacgtgagaaaaaggcggaatttcctaacggctggcgtattgatgaagtgattcaaaatcttatgcagttacgacgtgaatacaaagcgggtatgtgtctgcgtaatgaacagtatccgatgtataaaacatatgcctatatctctaagcatctaattaattccatgttttacatcgttggtaatcatggttccgctatagatataggttcttatgaaatcgtggcttatgctcgcgaacaaggaaaggccgctgcactgaaaatcatcgaatctggtgctatcattcttaaccatcgcattgatactattgcttactatggtgatcaggttgaggttgaaggcgtacaccatgaaagattcaacaaagctgtatttactaaaaatggctatgcgtatggtaatgaaattataacttctgctgttcctctcgttcgcctaactgttgaagggtttggagaaaggatgccttataaaccgtcagaagctcaaatgtgcgcggctgctgaaagaatcgccaaaaagcggaaaatgtataccgatgaatacctggcgtatgtcaacaagacaaaagaagatgtagatcgagaaatttcttgcatggatttataactttgatataatctaagcatctttttaagggaggatacatgaaaacgatacattgcagaaatgaaaacgttgtttactatcacggttcgtgtactgctgctggtattgaaagcatgttattgcctccctgtgattctgatactctgtctgaaaaaggcaggaagaaaaatttagaccgtgttttctttaccgctgatatcgggttagctcgtatatacgctggaagggccgcgcgttctataggtggggatcctgttctgtacagggttgtgtgtccggttgatgttgtatgcatgaatgaagataaaggcgcgagcgtttaccatgcagcatgggcgttttgtgaggaattatgaatgataaagtgttggcgtatctcgttttcttgctgggatatcgcttagaagtgatgggcgcgtattcatcaatgtatggtgatttaacggctatctggatggtcgggttaggggttgcttttacattcctttcctttgcaattgttaatgaatcggaaaaggatattgtatgaaactatatcatgtgatctactctggtgttttaggcattgacaaacaaatgttaattgatgtaatgtgtaaaaaactcgatgaacgaattggaacccgatacaaaaatcatgtatcggaaagtattttcatcaacgttgaccatccaaatgacatggaagaaatggtcaatactcttgatgatcagcagatcccgtttgttgacaatttcaacatgagcgctggagtgtatacggtagtaacttttgttctaaaaaatgttgacagccgaaacgatagcgtgttgaatgtagttgcaaaaatcgattctaccaaaggaaaataatatgaaaattgtacaccgtagcatttccgaactgtctcaagccgaaaaagtgcaaattcatttcaaattcaatgatttgcgtaaaggttatgccgaaattgcccgtgaatatgggttagataacggcgatatttaccaggtagtacaggaaattgaacgtattcgcgcgttccgttctgcaaatctccctgttaaaaatgcaatgcgccgcgaagcgatcgaaattcatcgtaagcgtgtgtacaatttagaacgtgctaaacgtccgatgaagaaagaaaagaaacctcgcccgtttaaacgcgaacatcttaacacctctatggcgctggcgtttcaagatgcggggattatctaatgcgtaaatctgcgatggatcgttgggctagtattgctacttcaaacgtaaaaccaaatcaagccgcacctgatgtagaagaggttcgtaaagcaaaagaacctgagatcgtggcccttagccctgaactcatcgagcatcgccgccgtgcgtctgctattgaattggatctgcgtattgcgcgttcatacaatctcaagcatgaacacgccgcaaagaacaaccattcttttgaccttactctggaagattggaaagtattgatgacaactgaacgttgtcagtattccggcaagatgtttagcaataaaccaggtagcccgtatgcccgtacaatggaacgtattaatccacgtctgggatatacacaagaaaatacaatagcggttatcaacgccgctaatgccgaaaaatcacagcttgatgcattcgttaagggtgatgtcattctggatgaagtaaaagtgaagttgctgcgtaaagcactttatcaagtcgaaaaacgtgtgaaaatgaaaggttaaattatgtttacaaaatattcttctctgactaaccattatgaaggtaagttcatcaatggtgtaattatgaacgggcttactggcggtgtgtgggttgcgcgtgaaaagatccacggtgctaactttagctttatcactgatgacggtgttaccgttacccctgcaaagcgtactgatgttgttaagccaaccgaagatttttatggctgttcagcagtagttgcaaagtattcccctgggatccgtaagatgtgggaaaccctcaaaaagaccggaacttatgatgatttggttattcaagtctacggtgaatttgcggggcgcggtgtacagaaagatgttgattacggcgaaaaagatttctacgtattcgatatccgtgtaaatggtgaattccttccggataatctgtgctctctgatctctcgatctcatggccttaaaatggccccgttgttgggatatgggacttttgaagagatcaaagaactgcctctcacgtttgaatcggttgtgaataaagcaaatagcggtattggtagcgatgacacggtctacggtgaattcatttatcctatctcggaagttgaagaggggaacattgcagaggggttcgtaatgaaacctgttctaccttctttcatgccaaacggtgaacgtgttgcaatcaaatgcaaaacaaccaaattcactgagaagaaagctaagaaagcaacccgctttaatgctccggtttcactgtcagaaaaagacaaaaaccaactcgatgagtttgtttgttaccttacagagaaccgtgtgaaaaacgttctttcgaaactggatctggcttcgatcactgcgaaagatttcggtcgcattatgggcttaacggttcaggatgctatcgaagaaatcagccgtaatcatgggcctttcctcgaacagttcgaagacccagcaatggctaaaaagctgtttgtaaccgaagcccaaaacatgattcgccctgtatggggcaaaatcctgaaccatgaattttaatcagattctggttgatgcaaaagcggctaccctgatcggtagccgtaaacctcctgaacgtatcgcaaacattgctgttaaaatcggacgtgctttgaacgaacgcgggattagggcttattctggcggcgctcctggtatggatagtcactttctgtttgactatagtccggataacaggtgtataatccttcctgagaacggttttaacggccttttctcaaacggaaaggatatcatcgactttcgagatttaaacacacagaaagccgctgatgaagccagaaaggtagcaggtaacttcgatacacagaatgaatacgttcaaagaaggtatgcgcgaaacacgattcaagttcttcgtgaaaatcttgacaatccaactgattttgttttattttgggcggaagaacgtgaaggatgtgttaaaggtggaaccgcgatcgctgtaagattggctaggttgtacagggttccatgtttcaatctcttcaaagaaagtgtattgaacgatgtgtgtgatacgttagggatcaatatcaaacccccaacgttggattttttatggtaattgaacatgcgcccttacttcgtgaaacatacgaaagatgggctgttaataacgcaataggtgaaaatatgattcatgtacgtagtatcggtgctgacggcgaaactccagtagaaggccgatcgcccactctcgcagaacgagcaagagaaattatcaacgatcagaatgctaagatgatcgaacatgcgcgggatacaatcacaaaaggtgttctgaaacacgcgacacaacaaaaccttatctatgatatgaagcacgatatcggctcttgtctgggtattgaatgtactcgctatgcattccaacgagtttctgaatggttggaagaagaagggctaaaattcgatacagaagaaaaacgcaacgccgctaagatcacaaattctctggctagtaagtacaatcaaacgtatagaaaccaggaagaacgtgaagtgttcggtttcaaaattcctgaaaggaaaacagatcgccgtgtaagtgaattcactttttacattagttggtaaaaaggtgttgacgggggttggttatagtagtattctaactcccgtagacaagacactaactcagaaggataaacatcatggaaatcgtaatgaaagcaacttatgctggatactgcctggaagcaaaaggtgttgctaacaatggtaaaggcttacgggccaatgttgaagcaatgctggatgcattacatgcaatgtacgaatatgacaacgtagcgggtagtgttcttatccaggcgttggaagtcgatggtgttgattgtgctggttggtgggatgcttacattgactacaacgataaccgggtttacctgttgagcaacaaagattatttctaaggaaccattatgagcgatgaagctgaggctttagaagattgggctgattttgatgacgaagaagacggtgaatatttctgcgttaatcgtggtgcttataaagaccgtttagaactccgtaaacttttatcgggttcctctcaaatatcaggatccaaacgaaaaagtagtaaacaaaaagttcagtatagtgatggttctgtacgtgatgaaactgttgttgctgaattccgtggtcgggttatcacaaaagaaagacaaattgatgtaaagaacttgtatgaagtggctaaggctgctaaaataggttctgtgattgtttgccctgtgtgcaaagaaaaacacacaaagacaacgtatcacaaagttttctgttcgaatggcagaaaaaccagtaaggattgtaagtctaaatatcacaatacaatccatcccgaacgactggatcgggtattttaaaataaacctaaaacgtggagtacgtttatgaacaacaaaactttcgaagaactgaacagcatcatcacttccgtagattcctataaggtttctcactggtcgcaatatccaactggctccgaagaggcgctgttttatattgaatctcgtggtggtaaatttgatcaagtagttacggctggctgtaaccgccttgcgcaaatcctatcacgtccggtgactatggaaaacgtagattttgctaatcggttgtacaaaatgcactttgggcgcgaaatcttcaactacaaaggttggaaagaaattgcagaactgggttacatccctcttgaattcagagcgattccggaaggaaccccagtagcggttaaaaatccggttgcaactttccatgctgggaaaaatgcgctgtggttagcaggacacgtagaaaccctggcgatcaggggagtatggttcccttcaaccgtagcaactctatcccgcgaatgtaaaaaagtgttgaagaaatatctcaagaaaacctccgatctcgaaggtgaagcatttgatatggtattacgtacccgtttgcatgacttcggcgcacgtggaacctcttctgctgaatctgctggtattggtggcctcgctcacctgtataacttcctcggtactgataccgtagaagcgctgattatggctatctctctgtttgaagattgtcagaaagcgtttgatgatggtgaaatggcggctggtatttcaattcctgctcgcgaacattccactaccgtttcttacggcaaagaaaacgaagaccttgcatacaaaaacagtattgagatcttcggtgaagggatgtatgcatgtgtgtatgattcctgggattttaaagcggcggttcgccgtatcgcagaatataaagattctattctttctaagggcggtactctggtagttcgtccggattctggcgatatggtagacaatatcatgtacgctcttgaagaactgggccgtatctttggctatacagtgaactcaaaagggtataaagtactacacccagcagtaaggatcattcaaggcgatgaaattcatggccctgaaacaatcaatcgggtgttgaactggatggagtctaaccgttgggcgtctgaaaacatcgcgtttggtatgggcggcggattgcttcaagaagttacccgcgacactcaaaaatatgcgatgaaaatgtgcgcaatcaaaattaacggtgtgtggactggtgtgtataaatgtccaaaaggcgctgaatggaaaaagagtaaaaaagggttgttaatgactatcactgatggtgttaactttaaaaccattgatactctggaacagaaagtgccggaaggctggaaagatgctatgatcacatactatgtcaacggaaagattactgcccgtgacactttagaggaaattaggaaccgtgccgggatttagtatccgcaaaaacgacaaaggaaccgtgattttctatgacaacattccccttgtagctcgcaaggggctttttgctaaaatcgctgggtattcctttaaactggaagaagtcaacgacgaaacactaaaagagatcgtaagaattgccttacagttaagaggtaagaaagacgaacagaaagctattgacatgatcaataaattgggtgaaactcaatgctttatagtgaatcgtggttacaagtacgataccattgcaaaatttgaaaaagggctttgtgaattatgagttattatggtgtgatcccatacacaggaaacaagcaatcgctattacctgaactattcaagctgttccccgaaagaagttcatacatgcgtttcattgattgtttttgcggtggccttagtgtgtcgctaaacgtccctaaacccgttctaagcaacgattatgataagacgctgattgatatgtatgagcgtcttaaaacgcttcctgacctgtctccggtgcgagaattgattgcatcgaaggggctggggaaagacaagaaagaagagtatctgaaattccgtgatgaatacaaccagaacaaagatcctttatggctctatgtcctgatcctgcattcattcagcaacgttaaccggacaaacgacaaaggcgattttaacgctgctgtaggaaaacgaaccctcaactttatgacagaaaaacgtttcgaacatttcaaaaagaatgtgacaggaattgaatttcgttctggttcatactctgatattgaaatcaacgataacgattttgtttattgcgatcctccgtatctgatcactgatgcggtgtataacaaattctggaacgcagatcacgaacgcgagttatatgctttccttgactccctgcatgagcggggtatcaagtttggtttatcaaacgtgacacatcatgcaggaaagcaaaatgatatcctgatcgagtggatgcaaaaatataatgtgcataacctcgataaaaagtatctgttaggccagcatactgattcttacgaacaaaataaaacgcaagaagtctacgtgtgcaactaccagaaacgcgacgtaaatacataccctgaaacactggatgacttaatgtaaggtaacatatgtttaagatttttggttatatcccttctgtttacaattgcgctccatgcctgaattctaaacgtctcctggacgcaaaacgaaaagaatatgagtttgtttctgtagccgatgaaaaagacgcagacggcaaaccgatcctgaatgaaacggtcatttctgaactcgaaagcctgttaggtactcgtagactgaccatgcctcaaattttccacgatggtaagcacatcggcggctttgaccaactgcgtgagtacgttcgcacgttgggataaatattaacacctttatttgattggtgttattatgctcactaaacgtattactaagaaagattatccatccattaaacaagctctttttgaacagcaaaacggcttgtgcgcgttatgtggtcgccctttagagggtgaccttgaaaaacatcaccttgaccatgatcatgctctatctggctctaatgccggacgtgtgcgcggcctcctatgtaacctatgcaacggtacagaaggtattgtaaagcacaaatttaatcgttctggtctggtttcccgtgatgttgattacatcgaatggctagaaagcctggtagcatacctcaaacgcgactattcacaaaaccgtatgcacgacaaatttatacccgataaggttaaatggtttacacgcctgactaaatcggatatgatagccgaaatgatttctatgggctttgagtactcagaaactgaggatcgcaaggctttagcaaagagctatagaagacaattaatgaaggcaaccaaatgaaatatctaaacgctcgattatcaacgaaacagaagaaaaagctgatgatgttgatatccgccactgacaaaaataccatatctctgcatgattggatgcttggaatgggtgaatctgatttgtgttatgtcaaaccaaaagacagaccgatgtttgatgatcgcggttgcacattgactgctttttcttctatccccgttattgatatttggaaactccttgagattgtaggacgggatatacctgttgatggagttgaactaatcaaatatcttaacgaaatcggacataatttagatattatccataaggcaacgaaatgaatgtagaaaaacgagacggaacaatcgtcaaattcgataaagaaaaaattcgtaacgcggtgtataaggctggcggtacgatgacggatgaagacagcgcaattatgcttgtgttgcatagtcagatccgcaatgacaaaccaatgaaaatttcacgcatacaggaacttgttgaagaatctttaatgaagacaaatccgactgttgcccgtgcatatatcgaatatcgtcatgatcgtgatatcgcccgtgaacaaaacggaaaattattccgtgatatcaagggtttgatgactcttagtaacaaagaattaaccaacgaaaacgcaaacaaagattctcgcgtattcccgactaaacgcgatcttctggcgggtatcgtttctaaacacatggcgcgtaaccatattctaccgaaacatattgtagaggcgcatgattccggtgatattcattatcacgatctggattacagcccgttcaccccatacactaactgctgtcttgttgacctgaaaggcatgttagaaaatgggttccggatgggtaacgctgatatcgaaccgcctaaatcgatcggtgttgctaccgctctcatggcgcagatcaccgcacagattgcttctcaccagtacggcgggacaacctttgcaaatgtcgatcaggtgctggccccttacgttgaaatgacgtacaacaaacactttaaagatgctgtttggtacggggttcctaaatcaaaacagtatgcgatggaaaaaacagaaaaggatgtattcgatgcgttccagtcatacgaatatgaagtaaacaccttacatactgcaaatggacagacgccttttgtcacaatcactttcggtatgggtactggttggcgcgaacgcatgatccagaaagcgattctgaaaaaccgtattcgtggactgggtaaaaaaggcattacccctgtattcccaaaactggttatgtttatggaaaaagggattaaccttaatccggaagacagaaactatgatattaagaaattggccctggaatgtgcttcaaagcgtatgtatccggatattattagcgcggctaataaccgtcgtattactggctctagcattcctgtatctcctatgggttgtcgtagtttccttagcgtgtggaatgatgagcacggtaatgaaattcttgatggacgtaataacctgggcgttgtgacaatcaaccttcctcgtattgcgattgaagccgaagcacaggaagatgaagacgcgcatgatgcattttggcgtatccttgatgaacgtctggaactgtgctttgaagccctgatgactcgtatcgatagcctacgcggtgttaaagccagtgtagccccgatcctttatacagaaggtgcgtttggtgtaaggttgaaacccgatgatgaaattctggaattgttcaaaaatggacgcagttctatcagtctgggatacatcggattgcatgaaactctgatgcttttcggatctggacaacacccattcgaccggatcggttctcagaacatgggtagactgattctggaatatctacgcgctgcgaccgaagcatggaaaaagaaaaccggatttgggtttagtctgtactcaacccctgctgaatctctatgtcatcgtttctgcaaactggactatgagaaattcggaagtatcaaagggatcacagataaaggctggtacactaacagttttcatctggacgttgaccgcaaggtaacacctttcgagaaaatcgactatgaagccgattatcattacattgcaactgctggacatatcagctatgtagaattccctgatatgaaaaacaacctggaagcccttgaaaaagtctgggattatgcaatggataaactggactacttcggaactaaccttccggtcgataaatgctttgaatgtggctctgatgatgaatttaagccaacagaagacggttttcattgtacccattgtgggaatcaggatccggaaaaaatgagcgtcacgcgccgtacatgcggctatttgggtgctcccgctgtccgtgggttcaacgaaggtaagaacaaagaaatgatgcatcgcactaagcatcaaaattaatcaaaaagcccttgacttcggttgagggcttttgttatattgggcctatcgaaaaggagacatattatgaaactgactaagaaaatgaccgatgtagtggcatgtgcgtttgcattaggctacaaagttgaaaatcatccaactcgcgttgaagtcatcaaccctatcaagggccgtcctggtttggttctgtgtgaagacggtacagcatatcgtaatgatgtctctttagaactggcaactactatccgcaccgcaaaacaaatgaaagatgttctcattagcggcgcaaaatgaggaatttataatgtattggacaaaagataaatttgtttttcgtgatgaaacgtgctttgggactgcataccgaaacttagctattcgtggtggttcgttttcagctaatgatttgtctaaggtagtattccctattaaagttactgagtatgacgtattcggtgttaaagggtttactgattactttgatacaaagtttgaatcagaatcttacattttcactaatagcgatcgtgaattattcaaaaaacacgttgttgttaaagagaaaccgttattaccaaaagaagatgaagcaaaggaaatctatgatctcctgaacatgcttgataatcttggtacttgtcatctgttcgggaaacgcgcccgtaaagcgaaagatgttctcaatctgttacgctctcgccggaattacctgatccgggaagcagaacgtaatctgaaaaattcagaaaaacaggtcgatgttcataaatccactcttgcgaaattaaaggctttgtgatgtttccgttatacgctaaagtgcgtcgaaatgtcggtgattcgtatcaggaatggagtgaatggctacgcgaaacaaagtcattctacatttcaaaagcaactgatatgaaaggccgtaacattcgctatcgtaaacccagtggtaagcgagtgaatgggatagattacattgttcttgattcgattcgggatgatataaaatgattagcaagatccttgataagttatttccttcccgtattgctgaacgcgagaagagacaaaatcgttttcagaacgctattgactatctcgaagaaattcgatttcagaaattcctcgaagataaaaagatgcgtgaagatgagaagcacccaaattctaaaatggctgacggtgtaacaaaatgtgctgttggtcggacgtggaaacgaaaagactacaaggatcttgtttctgctataccacgcggaagcctggaagattactcaaaagcaactggccgatcttatatcggatgtcttaacagactctgtatgattggtgttgtcaagagaatgactcctacgtataatcatgtttatatggctatcgtaaagaaaagaaggttgcaattctatgcagcatctggggaatctatcaatctaattgatgatttaattgaagttgggtatgtagacgacgggaaaattttaaaagctcctgattatctacgcggtaaactattgaaataggtataaattatgattttcaacaaaacaaattcacgtaatttgaactatctacgctgtgaactggaagctaacgaaatcgaactgtttttctgtggggctacagatccggaacacaaattgcattgggtatcaggtgagattgtaagcctaaccgatcagattgtcgaagaggctacccgccgcgatgcaatcgttaaaattggtgctgttgatgtgaactacgaaggacatccttcatttttcattcaatattatccataaaagcattgacctgtatgtctgaatgtagtaacatccttcttgtcaactaaggaggatgttatgaaaatcaaaaacactgctactgaaactctttgtaacgaaattgcagaaatgtactggagtaaaggtcacttagaggctatgaaagagtttcaaaagtggtgtgatacccaaaagttagctaaatgggaatacatcgttattgttgaacggatcaaagaattgatccttgtgaagaaaggtaacatgaaatgattcaactgaaattagacacaaatgcggtgttaagcctgtttccggaaggttcaaccgctcgcgtagatctccaatctgctatcatcaaaaacgtggtgaatagcgtagttggtaagcgtgttagcgaagaaataaacaaacagatccaggaacagttagctgttctaatgccgaactcatccgaaattacacagatcatcaaatctgaattctcggattacgtcgaaaaacgttatgggtattccaatgtttttgatgtcaactatggcaatgttcgcgaactgtctggtaaaatcaaagaatcggtaaaacagcaatgccaaaccattcttaaagatatcgagaaagaggcgattgctcatgcaacagaaaacattattgcagacgaagccgcgtttatcgctcgcgtctcgaataacctggaagttactgtacgcaaagcagtaatgcaacgggttaacactcagttcccagacattattgacgaagcgatcagagaacgtctgtttggtgaaaaagcatgaattacgaccgcatctataatatggatgtggtcaacggaaaagggatccgtgttgttttgtttgtgactggatgcaatcataaatgcgaaggttgttataacaaatcgacgtggaatccttgcaacggaacaccgtacacggaagagacagaaaaccatctgatttctctgttgagtaatccgcatgttgatggacttacattaactggcggcgatccgctttaccgcgacaactatcctactatcctaaaactgcttgagcgcgtttctaaggaacttccaaagaaaaacgtatggttatggacaggatataccctggaggctttacaggccgacccagaacgttctaagctacttccttacattgatgttctgattgatggtaagtatgaaaaagatttgccaacgaaaaagccgtttcgcggttcagataatcaacgtatgatcgaattcgctaaaaattcgatagaaattaaaaatattgcttgacctaatgtgtaactatggtaatcttaccacatcgtaaatgacgattaactttaattgagagataatatcatgatcctgaatttcaaaacccgtaaagaagcgcgtaactactgctggaagtggaacattcccctgaaaaccatccgtaatacagggcgcggttcttgcccgtggacagttcaagcaaatgaactgaaaacgttcgtggttggtaaaacttacaaactggttgaccgtgaagggtttactaccaattcacacggcggatctaacaccgcaaacactatccaggcgagacagatcgaaaaattcctgaataacgaggtaaaaattatctcgaaaaccaattcagatactttcaaaattgagcatactccggaaatgacttttagctctctgcgttcgtgggaagctcgttatttcgtcgaagttggcgcggctccggttaagaaaacgaaagctaaaccgaaaaaagccaacgttacggctccggtcgcacctgttgcaccagtaacagcagatcttgatcaaatgcttgatggtggttcggcaatgtcggttgaactggatcctactaaatttgttgaaggccgttcgtatgttctggttaaaccgcagcaatttaaaaatcgttgtggtgctaaccacgggatcaaatcatataccgatgaacacagtaatggtgtatacaccgtttaccatacgacttcgctcggtcatcatcaattgagcaaaacggtagaaaccattgattcccagaccggaaaagttggttactacctgcttgattctgaacgttcgttcttccgtgaactggcgacaggaactgttgatgaacctgttagcgtttccggtaatagcgctattgctatcaatgtagacgaagcggctaagaaagaagaaatcgcaaaagcaatggcacagcttgaagaagcggttaaagcccatgatgacgcgcttcaaaatctgcgtactgcttccgacctggttcgcaaagctgctcgaaaagtagcagaagtaagcaagtaaattaaactgggtgctccggcacccttttttatgaggtgacacatggaattattagaaggtaaatcttataccctgaacattgacgctaaagaatttgcagaaaaaacctggcgaaatgctttagctgaattgatcaaaaacaacggctatatcacaatcgatcgtattgcgattggggatactgaggacattgcttatgttctgcaagatgatttcgaatatgagatccctagccatatctggaaatacttcaaaccatatgatttgccggaagaagaaccgaagatcgctactaaagaagaaatcgccgcgcctgatttaaattttgtatcttccgatcctaaaatgtggatgactgtaaaacctgttcaacaagatatcaatgatctgcgatttgattatccttttgtcaagcggatcacttcgatttctgtactaccagcgccgacggattcacaggcacttgaatttgcattacagcatgttttcggtgataataagctgtacgcgattgacaaggaagctgctattgatgaacagaaaaaggaaatcatcaaccttctttctctgcatcaacaacttgaagcggtggaattgattgagcgtatgctttctgatacaaagaaagatatcattagcaaaatcactccggcacgaaggaaagcaattgatgaaaatcgagatttacggtattccagaatcgcttcataaatgttatggttgtattgaagctcggaaattacttgatgagcatggattagaatacgaattttattctgttctaaagccagcaaataacagtgtggggtttgattacgatagaccccgcattgaagagttagcgaaacgtgttcgtagtcgaagcatggcatttacttaccctcggatctttgtagatggtaattttattggcggttatatgcaattgaaagagtatttgggtgaagcatgaataaagaatacattcgcaaagtagcaaacgctattcacgcaacaacgattgattttctggaagggtttgatcatattatccatcccgaaacgttggatagttgggaagccaaactgtttaaaagcatcaatgaacagtttccggaaaaggttaagcgctggtttatcagacaggaaatcgtagcaacgatccttaatgaacgtggtgttgaggcgttcggtgtaacccctctatataagcgaaaccagattacagacgaaacaatcaagaaatataaaaagatggttcggaagtaataaataatcagttaaatggccttcgggccattttttgtatataaatattggtattgaatacaatataggaaaaaagataatggtagctaaatcattccgcgcacgaagtggccttgatgctgctggtgaaaaagttatcaacgttgggaaggctgatcgtaatacgctgagtgacggcgttaacgttgactttttcaatgaatttaacggaatccagcagtatgacccgacccgtggctattctcaagacatggcgatcatttatgcgcgtcgtatctggtacgcaaaacagaatattgcttcccctgctggggctttcgacgaatcaaaatggatcgcaactcgtaatgacccgaaatgggtttatagtaacgtaaccactccagacggtagcattattgaatctggtagttacattatggctgatggacgctttactgaacttctgtacctgttgccggacaacccgacagagggcgacgtaatcacgtttaaagattgcggtggtttagtaggtgtgaacagtatccttgttaagtctaacacccgtcagatccgtttacgtactgtacaatcagcacagtatagactgactcacccgtacatgatcgcaacgtttatctataacggtaacgtatggcgtgttgctgaaactctggacaaccgcgattctgagatcgtgaacgcaaccggaacaggttcattccagttacaatctggtatgacagttttccgtaacagtgctacgggtaaaatcactctccagttgccgaaatatgcaaatgatggtgatgtgatcacaacctatgacgctgataaaatgaactctatcaacgtagccgttttgcagatttatccaggtagtggacacactattactgatggtgcaagtactggtgttacttcggtaagtagccagaaatccggctttggtatgttcatctttgatgcacagaatagccaatggaaagtatatgatgctgataaccgtgttcgtctgcgtcgtatctatagtgatttaaacgcagttcctaacgattacgtttttgttactgcaaacccttctgggactataccaaacgttactgttacccttccaactgatgttgctgatggtgatcgcgtttacgtatccctttatatgatgggtaaaaaccagaactgtacaatcaaagttaaagatggtactacggataagatccgaaccaacaaaaatatgatgcagttcccgcagcgcaaagattatccgcctgatgattggtttagtgtaacttcattagcatttaatgctggtagcgattacctcccgtatatcgagttttcttatttgaaagctacgaaagaatgggttattgctaattatcgtccaatcgttgaacgtgttgatgcaactaacagatcgcgtactggtgttattgctctggctgcacaggcagaagtaaacaaaaacttggaagataacccgaacgacgaaaccgctattactccgatgacgttagcaaataaaactgctacagaaacccgtcgtggtattgcgcggttagcaacaactgctgaggttaacaaactttcaaccgatacctatctggatgatgtgattgttacccctaagaagctgaacgaaagaacagcaactgaaacccgtcgtgggctggcagaaatcgcaactcaggcagaaacaaacggaagcaccgatgatattactattgtaacccctaaaaagttgcataaccgtattgcatcgccgaccttgactggtatccttgcccttgttgctactggtggtactgcaaacaccaacacagaccgtgctcaggctggtactggaatttatgatcactcagattatcaaaaagcggtaacgcctaaaacactgcgtgagtataaagcaactgaattacaatccggtgctgtatggctggcaaacctgaatgaagttattaacggtactgttgcaagttctaacattccgaccgtcgttactccggaaatgttacacaagaaaacttctactgatgcgcgtattggtttgatcgagattgctacccaggcagaaaccaacgcagggactgattacacgcgagcggtgacgcctaaaacgcttaacgatcgtgctgcaacggaatcgctgacaggtatcattgcaattgcaaccactgccgaagtatcagcaggtactgtaacgaataaagcgatcgtaccgtctaaactgaaaggttatttggacgatacaagccatattactgttgctaccgctgacggattaactcaatctggtactatctggactacggttaacatcggtattcaatcagcaactgaaactcaacgtggtactttacgcgttgctacgcagtctgagacgaacgcagggacattagatacagtatttgtcacccctaagaagttacacgctaagaaagcgactgagagcgcagaaggtatcattcaggtggctacggctgctgaaactaccgctggcaccgttgcaaacaaggctgtttctcctaagaacttgaaaaatacaattcaggttgatacttcatggcaagctaccgatctggtacgtggtactgtgaagctgtctaaggggcttggtacttggtcgggtaatgatgtggctggttctactcttccggatgatggttacgcctctgtaggtgttgctgtttctccttatgaattgaacctgacgctgaaacattatctgccgatcggtgctaaagcggttgatgctgataaactggataacctggattcttcccagttcattcgtcgtgatgttaatcagacggttaacggggcattgactctaacgaaagaaaccactgtacaggctaacattaactcaaccgccgacgcgagtttccgggtaatgaatgttagtggagatctgaacgttggtgatggctcatcgatgggtaaacttcgtttgaatggcggttcatctaacgactggtcaattcaagcaagttcatcctctgggcgtattgcaatgatctcaacgggtaacactggcacagttcatctttctgtgtataatgatactcgcggcgttgtagctaacgttaaattccaggctcctgaaattcaggcgattggcaaagtgactctgggtaatgatacagtgatcacggctgctggttctgttctctctatgggtacgaacaacaagacaactaagatcctaacttcggacgctggtaacattttggcagaagaatcagggaactcttataaagtctttactgagaagaacgcgcaaaccttgctgaatcctacgtatgtacgtaaagcaggtgatacgatgtctgggcgcttgacggtaagcaacagttcaattatcattgcaggtcaagcggcttggtcaacgctggatgcagtaacagaagcatccaggggcaactggacggctgagatcacagcatcggcacaatacaacttgcttcctggttatgcggttccggttcttgaaccagatccgattaatccagaaatcatgattgtgacccgttatacctatgttaaagcaccgggtactttaacgcagtttggtaacggaactgcattcacttatcagatttgggcacctcgtccgacctctggtactggtgttaatgcgctggcgcaatccttctggatccgtcaaatgaacccaattacgggtaaatttgatggttggggccgcatgtatactagcaacaacccgcctactgctggtgagattggtgcaacgtctgctgttggtactacggttaaaaacatgactgttaccgattggatcaaagttggtaatgttaagatttacccagatccggttactcagacagttaaatttgagtgggtggcataatgtcaaacttaatggcggggttcggccccgattttgtagaaacgcaaattctatcggaaacaaacagcgtaacttacagaataaccgcaaaggcaacacatcccaatgcggttcctaatcagtatgagtttacactaaatcaaaaggcggtagggacaccgcctagtgttgggatcaacgtatggagaattaacaatgctgtagttgatccaattaaaaccttcacattatcgaatgataattcagcaactgcaaacaaagcgtttgttgaatatatggatgctcaaccttctgggctgtatttgataatgactaacggtgaatacaaaacaagccaaatcgttgatgattggtttgctaaaaacagatccgttatgtggcaaggcgctgatttcgctcagagattcccaaattctgcatatgttgcattgtatggggcttcaaaatctcgtatactgattgaatcgttttacgcgaacgatggagttttaaaagaagattcacgcgcatcaatcgatcttgtctatgataacgttggtgatgttgggcgaactggtgtacctttccgatctgttgaagatacggaagaatacaattcaaccaatgggtctgaatataaagtatatcctgttgcaaacccagtgatctctaaactggctgattatggtatggctcctggattagctatgatgattgctggtgatttttacgccagcaaagcattattggatgctggatcaacaacaagggttactgttcgatggtttacgggtactgctcaaacttcatcatcggtgattgaagttcctgcaaataaacctgatgagtggttacgatttgaacagttctatacgatccctagtggttgtgatggatttaacgttgctgtatctcgttatcctaaacccgctacggatagtttatctgcgatccgtaactttgtgatggttcaggtatctgctgccgaagctgatcaaaactttgctgcacagtttggggttaacggtatcagaatgaacaacatgatcgatggcggaacaccgtatatatttgaattgcctaatactaaggtttatccaggtggtgattattctgcttccgaattccgtgaagttgatgcataaacaaaggcccggaacatcgggccttataaatatgtaaaaaggggttattatggcagatttaaaagctggttctacagtcgggggtttacctatttggcactccggcacatttccgctggttccggttggtaatactctaacctatcgcggatataaggtttatactgaaaacgataaaccgcaagcatcaaataacgacttcgtttctaaagcaagcggtggtcaatatttgggtgtagttgcctttaaacaggggctacaaattaacgctactttcacaggcggaagtgaccagaacggtttatattctggtgatggtgatggcgcgacattatcaaaagccaacattgatcttgtatcatggtatggtattggtattcgttcatcttccggtactaatggtcgcgtattagtcatcaacgctcgaaatggtgatttaaacactcagggtaatattacggttaaaaagcaaatcagtattacaaccgctaaccctactgacgcaagtcatgcaacacgaaaaagttatgttgatggacagataaataatgtcacaacaaatgctaatagcagggtattacgcgctggcgatacaatgacagggctattaactgccccgcaattcgcgagcacaggcgcggcttcccgtcccgaacacgtaccacggctcgaccaggtaattactaaagggactatcatagattttggatcttattaaggtgaaacatggctgatttagaaaaaattcaattcctacgtagcacagttgcggggaaaacacctactacaagtcagcttgcagatggtgaactggcgatcaacatggctgattatgccatttacacgaaaaatggttcttcgatcgttcagttagcgggtaaaggtatcccagaaacaaataccaaaaaattaacagttgatgggcctagtgctcttaatgataccgttaccgtagcggaaggtaaaactattactttcaccaacgagaatttaagtggtgaaataactcgtcatatcgtcggtaaatgtgccagcaatgatggatggtacatcggttccggtggtacaagcaataacggcattcttgaaatcggtactattgacgatggtactgaaacaatccagtttgtacaacgcggtgctggtaacgtagaagccagaaaattagtcttacttgatagctctggtaatactactcttcctggggatttaagattaactagcaagactgttaaaatttcgaatggaagcactcttacactagaaatgggtgtaggtgctaatgacgcttacattaaaaacttgagaggctctggcgttcttcaattaactaatgacggcaatctgacgttcagaaattcccaggtttattatgctatgagtggaagaggccctggtaaagatggtactcttctgactaatgtagaaaacgagcgccaacttaagcaagataatttccctatatctacaggcaccgaagctcggtggactaaagttgctcttttaaaagatcctggatcaaaccagagtcgcctgcaactgatggtgactaacggcggtaactatggttctacgcgtggatctatcgactttatcgattgtagcgctagaagcattcccgcaacattaacaagcgcaaacattagttcttatctgcaaattcgtcgaatcggcgatcctggaattgataacactaaccaaatgcgttatagtctggttcgtacctctgagggtttagaactgtggtttactcaacgcgcgtttattggtggtgttaaagttgctctgctgtctatcgctggttatactgagtattatctgcctaacggttacacaacttctgcaactgctccggaaggtttagttgagagtgtggctattcgtatctatgacgaaatgaataaacctaaccttgacaatggtactgatggtattctgtctattgctaaaggtggtacaggcgcaagtacagcggatgctgctcgtacaaacttaggggctgttgctcgtgctggcgataccatgaccggtaacttgactattaacgctaacttaaaagtcgaaaaccctaatggaacgatggttgatttaggttcagagaactcagacaagtacagcagattaacccttgctcgtaaagttggtagcggtgctaccgtagcaatgcttaaagttactcctgaaggacacgtgcaatttggttatcaagatgcagttgctactccagctcctagtaaatatattctagttaaatccagcggtcttgaggtagaaggggatttagtttttaatcagacctatcgcggcaccgaagaggcagttgatattactgataagactgttgaccttaatggtcttgtcattaaaggaaccgacccaggtactcgtcagatgtataaatgcttctcatctggtggtggttctaatatagctaataaacctacctctgatggcaactttgttcttgaagttttatctttgcgtaaaatttctgatactgattggacgtgtaagcagacctttactacaaagaacggcggcgttgaaggtacgtatgttcgctacggacaaaacggctcatggtctgcatggaaagaagttgttgctggcgtccaaccaattaatttaggtggtactggtgcaacttctgtagctgccgctcgtaataacctcggtgttggtgaatggcaatctgtggcatttggtgtattgaatgtcaacggcgttagtaatgcagacccggccatcacatttaaaaatggggctatggttcgtgaagcacaaggtggtagtctcggtgcgttaatcctgtcagcttctgcttctgctacagattcggctaaatatattgcttttcgacccttcggtgattcgtctggtactgagattagagtaaaagccaacgtgtacaacgagccttcgcttgaatggtcttatggcgctggcgttcgttcatccgctgtaggtgcttttgtgatttatgcaaaaacaggtcaggcactccatttaagaccaaacggtgataattctaaccaagccacagttattgaccaaaacggtaaaatgacagtcggtggtgagttcgaggcccagaactcgaaaatcacaggcaacttgagcgtttccgaagataacagaatgatcgttcttggcaaaaacaccgatattggtttagtcaagaaaagtggtatgccaggaaaaatggctattagtaaatctaactcgtttactatcatggtatcaacaaataccaacaaccaaattaatcctgctgatacgtttaatgatatattcaaagtagatgctgatggaaaccagactgtttacggaaatgcccagattaacagacagctaacagtttctagtgcagcgactgttaatggtgttattaatgctaacggcggtattattgttcctactaccaagtatgtacaaattgccgatgctcctacgcagaataaccaagccaccaacaagaaatatgttgatgataaggttgcttctgctattagtaatgctggcgacacgtatcttccgttagcaggtggtactgtaactgggcggttaacaattacaggcgatcagttaaaaactacatcactttgggttacgggagacgctgctgttaatggtgttttaactgttgatggaagggctagatttaatcaagagttcattgtatcaacttcggttaacgtccagaacactggtaacagtcatttggtcttccgtaaagctgatggtacagaaaaaggacttatttgggctgatgagcctggtagcgttagtataagagcaggtggtgtctctgggccaacgtggaatttctggaacagtggttcttgccaattcccaggtgctattagtaactttaatggtgttaatagtactactaattaccctggcggcggaagtggcgcgtatttaaataccgctggcttaacaagtagatttagtaatggtgcttatgtttccttatacttccaagaatatgtaggaaattatcaccaggctattcttaatgttaacggctatggtcgagatgacaatttctatttcagggctggcggcgacttcttctgtactcgcaacgggtcattcgataacgtagagattcgttctgaccgtagagctaaatctgatattaaagttattgaaaacgctttagaaaaggttgaaacattatctggtaatacttatgaacttcataacacttctggcggtactactcgttctgctgggttgattgctcaggaagttcaagaaatcttaccggaagcagttactcaagataatgaagaagatggcggtatgcttcgtctgaattataactcagtaattgcacttctcgttgaatctgttaaagagctttctgccgaagttaaaaatcttaaagcagaaattgaagaacttaaatctaaataatgcatggggcttcggccccatcttttaggagaaataactatggcagtaacagggccgtgggtcggaagttcagcaaaggctgaaactggtgagtcgtggatggctcaagctggggccaaattaagaatagggacaccgttttggatgtctaatatgattggacaaagcgtattccatttaattttcagaattaactatgcacagggttcttctggtgatccatctagatatagaggattctttaaaagagggttagcagtaaacataggagactctgcaaaccaaccgacgctgaatgcgttccctggtggagatgtgggttcattagtagctattacaaatatcaaaggcgacccttattgcctttctatttggaatggtcaagataggcgagttaaagtgtctatatttaatgcatccggtggagaccagtatgatgtttatttcagcggaactactatgagtgatggttggagaagatatagatgtgaaaacgctggcggtctcaatgggtattttgaggctagaatggataaccagtttggtgctttattagaatatgtttgataggtaaaccaacaaattcacctcataatattaaatagattaaaaggctacctgtatggtagccttttgttgtatcctaaatatacgtatagtaacctaagaagagtcttataaaaatggctgagagaaatcccgtagataaactagccttatttgaccgggtaatctcgtttgtgatgggtgtgaaaacatggaaacaattgctgataaaaataattctaataatggttatgtttcttatggtagtaacttggtacaaatggactgatatattcccgatgataaaaggtgcccttgtagtcgatacaagggctatcgaaatggaaagaactgaaaagtttaatcaatccgcgttggaacagttgagcatagttcatcttacttccaacgcggatttttcagcggtattggcattcagaccaaagaatataaactattttgttgacattgtagaatatcagggaaaattaccatcccagatcgatcctaaaaacctcggcggttatccgatcgataaaacatccgaagagtacacgaatcatataaatggcttgtattattcatccactaaagcaagttcctacctaccgacacgtgattttgtgccagtagcttatacttttagttgcccttattttaatcttgataactactattctggatcggttttgatggaatggtacgcaaagcggcctaatataccagatatgaagctaaacatcatatgtggacaggccgcgcgtattttaggtcgagtgaggtgattaacgtaatgctggtgttaaattgtgtgttcttccaatagcccgtttgattgctttaaagaagttcatcaccgggctatttttctcgtaaatatcccaaactttcaatttgtcccacggatccggaacataatcttcattccttgccgaaacccctaacgtaacccgcctgtatccagcgctgtcgtgataatacacgaagaatggcctacctattggcgcaaccttacaacctctcttagcggctctcatagcctcatcgaacgtcattgatacctccaaaaatttctatgcatgtttggtcgaattccgatagtttcactcaaaatgaatatcggatgatctagctcatcgtggttttcttcgtcaatgacgatatcccaatcagtagccttttgttcttctaccgtggcaatgaatacctggtttacttcacacttgcggtgtgtacgtctgatgattgtatccccttcacgaaacacaatcatatcagggttggtagtgcggtacgcggttttacccgcgcacacttcattaagcatatcttcgtatgtcattataaaacctttacacgttgaacgatggtttgtttaacgtctttgtattctccgtgctctttaacggttgctttgaaagtgatttcatcaccttcgtttgcaatgttattaccgaagtaaacaacaacattaccatcaacattaattttggtcatgaatctttctacagaagtgtagtaagaaacttgagtatatcccagtgaaatcactttctcaacggttccggtcatttccagacgctgtttgatttcaccgatgtggttagctttagaaatgcgttcctgacgctcttgttcccactgttcgcggatttcttcgcgtttggcgatataatccttctccagtgcaacacccatgcagtaggcgcacacagcgtcaaaaacagggctgtttttgttgtcttctttagacttgtcagcccaccaaagaacagtaaacattggcatttctgcaattacttcgcctttacgcttgccaatcggcatgatccctttttccagcagttccagtttttcagtatcgaacactgacagtttaccgcgacgttcgaacagatcgaaatctgcaaagccctggaataccattttgaaagtatcagtttcagttaaacgggctgaaacacggtcgaaatactcacgcgctttcgcttccgctttctccggatcggtagataagttgcagatatagttatcagaagtataaccgccacctctacgctcaacacgcaaggtgtacattgcatttttacgaccagaagaaatgaagtaagtggtagtaactacggttgcgttagtcatggtatttctccttaaagggtatctcgtttcgatatggctaatatagcaaaagcccctgaccgaagtcaagggctttttcatcattcattcgaatctttcattgttttatgaagatgaatatcaaaaattttccagtacgcctttccgcgaggataaatttttgctttgtcaatatcgttgttgcttccccatgtgttgtttgggccacgacatcgattttttatataatctgtatgccagaataagcgctgaaccgatgattccgtacctaatggatcttctttactgaacagaatttgtatactcataagaagaacccagtgcgaacaatcagatcgattttcttttctggttcaaacggtgatttgctatcgatgttacactgatagaacataccaacatacttttcaggaatgttagattcaagcgcccatttcaggttgtcatcggtattcggccccaacataaggttaacaacatcaacagcataatcctgctctttggtgttaccggaaccgtttacataatgcccgtgggctgttttgaggatctcaattacttcgctatcgtcggtttcgactttgtaaagcgttgtattttcaggaatttcttcaagaatgatcaaagcggttttcatcacacttacctttgtgtttctgtttacgttttgcttctttaaatgctcgcttgcgatcgcggtgagtagaagcgcggttaatccatgcatgtttcgctaccaaattattcatataagccccttaaagaaaaatatttaggggctttcgcccctgtatcaatccagcagtttgcggatcttgtctgcgatacgtccggcacgggttgcgcttgcagtatgatcgctttcttttgaagccagttccgccagcttacgctgatgttcttcttctgctgcttggcgatctgctgcaacctgtgcaacctgctcattatcgtgagcaatacgcgcttccagttcagacagggttttgtcgaaagttgctacgatttcatctacagaacgaattttattaaacagtttcataatttatctcaattggttagttttaatcagtatacatcaatacggctggaattcaaaatcataaatgtcattcagtgcgcggttccactcggtgtagttttcaccagcaccataacgcatttgaatagcactttcgaacgttgatccgttgaggttcgggaaaccgaacaggtttttgattttgtcatgtgctacatagtacaaagaagcactttccagcatcgcaaccatcgcagacggttcgtgttcgcggcgcttgatacgtaacagagtacgactagcaccagttttacggcgttgatttggtgctacgtagaaacggaatactacgcgccctgttttatcatcaactaccaggtaaaacccgttttctttcagatccacgccttcgaatttcttgaaggttccgcgtttcatgtcaccaattttaattgcatatttgtgaatgtcaagtcttgtcagaattcttttcatatttttttagataccagtttgcctaattttgtaatttcgcctgtttttacgttaacaaacaaggcgatgctcagaaatgggatgctaatcactacgctgatcaatgtaaacagaaaacgtatcacaaaaagaacagcacgttcaagatatcgttgcatccacgcgattcctaaacaactataccctactataaaggtggttgcaacataaaatgcaccaaatcctttacgaaatacgtaacctttcccggattctatccggtcgtcggcccacatttcacgggcagttttcagaatagattcaccactagcgcgagtttcgttagccgaaggcatgtttttaaatttcatgatagtctcctatgcgcccagaactctccgggcgcggttgtttag

SEQ ID NO: 48 - DNA, 172485 bp, unidentified
  source 1..172485: mol_type = genomic DNA
ttagtaatggctaaaaccatatgtaacatcaatcatgactttataacggcatacacgcatttttgcgttattgtaatccactgggatcgctaccacgtcagcaggatccacctttacctgaatgactctaccaacaccgcccccgtagtgtggaaggtatgatttagccgcaacgtgtaggccagtagaacaggtgcgcgttttatcttcgtctaccatgtttcgaggcatggagacagtcacaccaggactattatcaaatttgccagtagcgagatctttatagttatcgcgcacacgtttccaggcaagaaaacaaccatcatcggtcagttcaatgtcattatgtacaaggaacccgtaaagctggtatacagcatcgcgtgaagggtttcgcatcaaccgttcaaagaaattcaccagatgttcatacggacgatcgttatacatttcgcgaatgattcgttgagtgatatcagaatcaaacactacatctttatatagaagctgatgaccaatgattttaatgttgcctttgctataggttcggatcgcttcttgagtatccaaacaagttacagcacctttgacatcaccagctttcagcatttcatgcgctttcttaaagttcggatgtgtttcacccgccatgaaaacgcgcccttcgtatacaaccgtaataaacgattcagatccgatcatacgtggtacagtgtctgatactttaggcttttgttttacatcccttttcttagggaattccgctaacttgcggttgataacgcgcccaatggttcgggcgcttacgttgaactgttgggccagtgctgttttacttgcccccgtcaaccatccattatagatagctttctgttgtacttcgtcaagaattttgaccattatttccaccgtattaatttcttaaactcactgagattcttttcgttgttgtaaatcggacgaattgaataagaatcgctatgttcaacaagtgaagccagtaacgggtttagtgatttaaagatttcccatgcctgatcaacacgttttttcatattgctgcgtttaacgcgcattgatgctacggattcacgcagaatcggacaacgcgccctggaaagatttttaccatctttctcatacccttccagacacactatacgttcgagggtatcaacaatcttatacagtttttcattatatcggtttttcacaatccgatcaagcgatacaccaaaacggctatgcaatgcgtctgtttctgttgagtgttccttgccaatccatccaggcaagcaattatctttcaatgccttttcggatttaacatactgcttgcacagcatatcatcaaagcataccagatttgaatctgggatccacttccagaggctgttacggatagcaaacacaacagggatcccagtatggcgcatgatacgcgataaagtagattctttcattgctgaatccatagacaacctggaattttcaccatctaagcggctatattcatcaataccatacaaccgaacacctggggctttatccagtgataaaaactctgattttgtcataaacagagaagtttttgccagattgccgttactatccaactcataacgatatacggtcggggtttttgggcgcggttctgaatttttcggtgcatatagcgcttttgatttttcgcgatctgtatcatagatctctttttcttttgtcatttcactggtacggagatacacaatttccgattcatcaaaatgacctttccgaacgatatcattaacaatctcacgctttgaatcactatcgtaatatgcaacaaagctaacacggcttaggttatgcattttagcatacccgacgatatacggtttaaccgtgttggtatccacttttaacaaaatgagtttcttctgtttccacggataataaatgcgtgtgatgtcctggcgtttggttgtttctggcttatacttgctccagcggcctccgctaccagttacctgataccatgcatctttaccgtcgtattcgttcgcccaatacccagcaacataatcatcattatatttgtttggtttgactagttcgctatggatccagccaatagaatcaccgttgatgcgaaaattagcatctttaccaacaaagttttgtaccattgaaggcagagaatggaaccacgtcagtttatcacgaacggtttgtaacttatcgaattctgatttaactcgattgaaatacacccggctgatttgtttcagacgttctttaacaatccctactgtcattttatccatactcaactcttcgcgagaaggcatgaaatcaagttcaccgattgggaagtcaataatatacgtatactggctttctgtatagcaatagaacatcgaggtatcatacaaatctttatccagaggataaatgatgttacccatgcgagcatatacaccgctagtgtatgctgatttatgacggatcaccccgctatcgttggttgcttctttcggctgatagttgattttgagaatagaagcaccaacaaagttaggacgaatatcagtaaatgattcgtatacccttgctgcttcgttttcccattctttgatatcttcaaccttaaccggaacggtgatagtaaccccgttaggttcatcgctttcaatctcatacagaggatcgcagaaaggttccccatcatccatatagattgtgtaaccgcatttgataccgtcttttacggattccaccgtgaaagcatcggaatagcaaagcggagatttgcaacccagacccatagaaccgatcaggtcgtttgaatcatttttagttgattcgaagtaaacggtaaacgcatcactaacgaaatcaggagacataccgatcccgtagtcacgaataacaaaacgaggatcaacagcagttggcaactggacatcaaacgggttctgatttcccgcttctttgtgtccatcgatcgcattacaagacagttcgcgaatgattgcgcggatcttgtatttgtatactgtcgaagaaaggatcttatacgctttcttgtttgcgcgtagagatagtttgtttcgtcccttgctggtatctgtaccaactcggtagatggtttgcggtgtatcttcgcgtaatttcattgtttatttctcacttaacattaaaaataacttggtcacaagagtacttcgttggctttttgttcaggccatattctactacttcgcaataagtgtcaaggaattttactaatttttcttcctcgacctgctgtttcttcatatcaaggataccccacacgatagccccgataatgatagaaaagaacgcacaaaatccgaatatggccagatattttcccaacttaggcgcattacaacgtgtcataccttatccctctttgcgaatgtatgcaagttcttcgtgggttactggacggatatacagacggcctttcgtgtatgccttgcgcccgctgatccaaatgtttttcatatccttaacaccgttcatcacatcgttgtaaaacttcttatcagctttagcctgatagacttcacggccttgataatctttcatgaacaaacaataaaggatctcgttcttatcaactagattagcatcctttgtagttgttttacttggtgaaggtttagcacccaggcgcaaggccatagcttgccacactttaccatgttcataaccgcgcccgacaagagcatgagcgatttcgtgtaaaagagtgtctaaaatatcctcgtagatatcttccgcaacatgacgaccagatagttcgatcagttttttggtataactgcaacggcccagagtttttgtaatgcgtccattgatccggaatgtccaaccattactgatcaaaccgtgtttttccatcatggtacgcgcccagtgggttacttccattgcactacgagttttcaacattttagaatctcctttgcttggtacaaaaccaatatagcaaaaagccccctgcattgcaagaggctttgtaattatttcaacttcttagaaagttcttttaaatcattgagatactcaattttaggggttgtttcttcccagtatttcaattgtttgcgcaattcttcggcttcgtcttccagcttttttctttcgtccgtggttagatggtagatgttcatagccactaacatttcggcatgattctcgcaacctatccacgtagacacaaatttaaccgcttcgctgcgactaaggccacgcagagaatcaggagattctaccatttgagcaataaacgcaacctttgccagtgctttatctaacgcttccttagtttcctggatacgcttattgatacgctgttgatatacattcatacgaatatcaacgaaatcctttagaagcgtttcagggcgttcatatgagtataatttaccctcaaagataacgttaatgtttgggtttgagttttcaatcaacccgaaatctttcaggatcttttcgcgggttaacccgttggcatactctcgcttgagcgttacttcataacgaaaatcttctttcgatagatccttgtagctaacaataacgcctttttcttccagcttgtcaaggattgcaatgtatttcacacggtcatatttcactgggatctcggtgatcaccaatttggttttaccttgcaattcatacgtgccgtaaattgtcccgtctgtgatttcacctttaaagtaagggtatttcagatccagtgtgaaatctttatcattcagatatgcaatgcacccgttaacaaccgatttaggatcatgaggcggaatgtttgttgcatatgcttttgcaatcccgctaaacccgttaaccagtaccatcggaatgatcgggagatagtacgctggcggtacatgttccggatcttcatgaactggcgttaaatcaccatccatataaattgctttgaatattggcgatagtttacacttgatgtaacgaggtgcgccaggtttcttaaccaaacgggaaccaaagaacccatcacggtcgaataacggaatgttattgcaccagtgcgccgccataagggataacgcttcttctacagaggtttccccgtggtgatacccatacatagcaacaccgccagcgatagaagctactttctgaaatcccgttccgccctgcatagcagagtgaataaagaaacggtgaacgggtttaaacccgtctaccaggtgcgggatcgcacgtgaataaatcgtgtaaagggcaaacgttagcccttccacctgtacaacatctttaatacttctttccattagtcaaccttagaaaatttgtgttttccattaacccaatctttacgcggatcagattcgtcgccgaagcatagttctaacacttctttgtattcgtcgtcaagtacgatgacatcatacttcaactgatcacccagaacacggtcgtaatcttctttgcgtaaagaacccagccccttgatatatcgtacatcttttgctttatcgcggaacggtgcgaactcatcaagagaatagaaccatttttcctcgcgcccaactttagcgataacgatcggggttcgaatatatcggatccgtttctcagtgaacaaagaaggccaacggctaaagaatgcaagcaacagagttaaaatgtcgccgccgtcaacgtcagcatcgaccatgatgccgatattatcataagtcattccggaagtatcaccaggatgaatattgaggatagccattagctcaaacagttctttgtttttgataatgtctgtaaaactcataccccatgtattcagaggcttaccacgtagcgggaaagcgccttgtgtttcttcattacggcattcgatgaactgaccaacagcggaatcgccttctgtcagaaacaatgttgtttctaccccaggggtatcaataccggaagccggaacgtgtttagcaatttttgcctttttcgctttctttttcgctttggtgatcgcggcggcttctgctgcttgtttacgaatcaatgcggattcaatgatcggagtaatgatttctggggtatccataatcatttttgcgatctttttgtagttcaaattcgcatgattgttaaactcacctgctgtatttgctaatcgctcttttgtttggctatcgaatgcaggtgcattaaagttatgcaggaataccacaagagttaagcattcttttacacgtgctttcgggatctcgatactatgctttttcttgatcatcggttcaagttcagaatagataccatcaatcatacactcaacatgaacaccgccgtttttcgtatccagaccgttaacaaaggatttctgtttaaacccgtcctcagtgctcgccagaatgaagctgaggcgattatttgtctggacaatggttttatccccatacatggaagcgtacagcgggaagcgattagagagcgtttcgccgttatatgtgaatttcacagacgggaaagcaacggcaagggccattaagcgatccttaatcacttctttggtttcttcatcgataccagttacaccaaacatagagaagtctggagtaaacttaacagtagtaccctgttctttactggggctggttcggtaatcgatgttctgtgcgccgtccgtacagttaatggttactttgcgtttcccgtttgcagtctcgccaataaaaatcgagctataacagtttgtcaggaaagaaccaacaccattcatacccatcgttacgcggtttttatcatcgaagttagaacccgattttgccatagtccatgctgcaactggtttaggaactattttcccgtctggggtttttacatcatcctggggaataccgcgcccgttatcagagattttaaccagattatgatcaatggttacatcaatcttattagcatgtttgaattcagttcggatcgcttcatcaatcgagttatcaaggatttcgttgatgattttaaccaacccttccacgtactcaaccttgcgatattggcccattatgaaacgttcatgcgcttctttgttaaccgatccgacgtacatatttggacgcaaccgaatatgatcgcgatcgctcatacaaaatgattcgtcaacctttgcgccttttttggctggttgtggtttctgttctggttcatcatctgccagaagaaaatctaaactcatattcacctctttgtttaatcactgacattatatagggttctatgaaaaagaaaacccctttcggggtttacttgttataagggaaaccatcacgaaccatttgaggtttatcaaccgttcgttttgcttcgcctccgcaatcacaatctttcggtgcatcacgggtagcaatgcttgccatttttggaaattctttattacacttggtgcatttataggtataggtaggcattaataaatctcttttaaacttaacatcttaactaaacgggctttgtctatgtcaaaaacacattgacgtgcgcccggatacaacttttcaacttcgtataccatgcagacgaaaccaacatggtgcatgtactcgcgttcatatgcattgaaccaacgagaaaggcgctgtattgactgaaaaccaaagtataacccagcctcttgaaagtctatattatctttttcaaggttgcgcatcaatcgattatcgtcatccggtgctggatgtcggttatcatccatatcaatatagatatcaggattcatacagaattgatccaaccattcagcagtatccattgacacataacgattgacatatgggccgctttttgtttgccatttttctgtacaatcattccagaaagaacaagaaaattccacacgatatacgaacatgatataatcctcacaagtaaactcaaggtttacaagtacgataccacttatctaatttttctgcaagcatttcgttgataatttttgcaatttcgtaccgtccgtgagtagtacccagttccaggtaaatcacatcaagtgcgcacacaatcgcatcaatactttcttcaacgatattaccgccgcgttgaggctgaatgagacattcgctgatctcgccaacttccgctgataggtgatgaaccacatcactcttcgtgcgtttcttcactttatgagcgatttcaaaaaacttatcaagtacgatcgccgtttcttctcgcgttgcagtattctcggatgtcgtctccgtttgttgaacaacgtattttgtaaaatagttttcaaacacgttgaaagggatcacatgaggaacaccattcaaaaacaccccttctttacaaacataatggatttggcgcggaatagacaacccgccgctgcgttccaaatgtcgtttaacgcttgctacaaaatcgaactctttcccgtatccagccgacatactgtgatacgtgagtaggccaaatgcagaaacatagagatcattttctttatacagattcatttacaatacctttatggtagccaaaaatataacaatcaattgaaggacgttcaccagggaagtgaatgcattgcatgatgcgttcagccattagatcttctcccatgtataccgaagtagtttcttcgttgtaatgggtatcatacgacgttttaagcgtcatgcccggaagccctgcaatgtgcatgaatttagaattggtgcaaggttttcctacttcaccgttgatcatcaacactgcattagttttacgtgcttttctcatttgaatttcacccctatttgcgatacgttccattcttttacttcatcaacaatatcataatggttgatgtatggtaaagcaatttttaaattactcgcatcttgaatgttgcgtaagaaacgagtaggagaaagaagacacaaccgctcggatccgttgtttcctttagcggcaaatgatagggtttctcccccgtcaatcttcatatcaacagaaatcgttttgaattctggtgcgtatgacgtgattttgccgttgtctctcggcgtactatagaaacatacactttgtgggacattataacgatctgtttcaatgtacatgtaatcgccgtcagtcattccccacgcggtataaagggatccggtatagtcaccaaaggaatttttaaaatcttccttcgtggtatatcccagcgagcgcaattgcataagctggttatgctgttcgattgcgtcggctttttgttgttcctgtacttgcgcatcaatcgtttcttgccaggaattatacgcatagtaacccacaacagcgattacagccataacccctacagctttccagattttagcgtcttcgtttttgttactcatgctatattccttttaagaaaaagggccgaagcccctttgttaacgaagataaaccacataaccgctttggtcaatcgcgcggtctgcgtcattgaagatattaccacgaatgccttttgctggtgctttccagcttgcaggtttcaggatattaccatcattatcgatgaaagcggcaacagaacgctgattgaacatttcaccagtttctttgttgcgagtatcctgaacaacgcgatgatatttgcgacctttctccagaacgaaaacagtttcgaaaggagaatcctggaaacgagcgttacgcgctttgtacattgcttccaggaaaggggctgctttttctgcgaggatttcgaaagtgttcatggtatatctcctaaagtgtgtttcgtttcgatgtaagtactatatcaaagatagttattctatgcaaggcttttttcgttatcaagcaaatattttaagtgttcttttaatgcaggaagttcgttaagatgacattgtttaactttctcatactctttgcgttcccagttttcaagattgctcgccaacgcttcatcacaataagcgatcccgcgttctgcatcctgaactttctgtttccattgtgcaactgcttgttgataaagagaaccgttaaccatcataataatttcctcccttgtttcgatggggtaactataccaaagctaccccagaatgttttaacaaaaagtgctattagtaggtatccagtttatacattttgcaccagttcatgaattcttcgaaagtctgagtattaacacgtttttccttcttcactttcttagtgattacaggacggttagtaaaacgtttttgcattttcacagtgattgctactttatcgcccaggtcttcaaccttttcaaccagcgcccactgagaaccaatttcagcgccgaaagtcaaaccaacaatctcacctgctttaacgtgtgctgcatattttactttaaccattttcgtattcctttctctgtttcgtttcgatgaatacaagataccaaaaagcctcccgcaatgcaagaggcttctttaacaaaaaatgctattttatttctttgagtaatttacggatcccgccgccctgtgtcttatcaaagattttctttgcatcaataacagaagtgattatgtggtagttgttaccttttccgtcaaactcaaactcgaccttgtagtcactacgaaatttcacaaaaacaaattcacctgcaaagtgcttacgaaactgtttttcgttaatgtccaaccattcctgtgtatcatctaactgatacatgcgacaaaataggatcgaacccattacagcaatcacgacaaggatagctaacgcgaattctgacatcatttacccctgtttactgattgacggtgcaatgatttaggcacaaccggatttcggtatggtttgactttatggatcgtgggttcttccccaaccaaattaggaaattggctgttccattccatcgaaaatggatagggtgatgactttaactcttcgatcatacagtttactaaacggtcgccgattacacccaaagccgccccaataatcgctatacgcataaatcaccccttaattgtgtcaagtacagtaaaccagtcatgaagccatatcgttgttcttacagcgatatacgttaacaaactaatcaatgataccgctccgcaaatagccagcgtaatcaacagccggatttcaaatttagtaaaattcatatcaatctcctttcttagaacccaatataacaaaagccctcaaccgaagtcaagggctttgttttaaatttttaccagttttggcaatcgaagaactataccaggatggatcagacgtgcatccggaatagaatcacggttgattttagcgatatcaggccaaagttcaccaacaccatacagtttctttgctatagaatataggctatcgcctggttgcacgacatagcgatcagattcaatcttaaccagatcctggttaatgatatcatcaaaggcttttgctttcgcttcgttaatcgtattcccgtagtaatggcgatccataatagttaatgtgatcatcgtttctttcctatgctgttttcgtctgtctcttctaaggatggaggttcttccagccccagagcataacgtttagcatagattagcatcaatgcatctttagcgcaatcatgaatcgaatcatgctgaatgaatccatctaacatgcctttacgtagtggacacgtggtcactccgcgagtcagtaaacggttttcaatagctgtacgcacatcacggctattccagaacacggtcggcatatcttcaaacgtatcaagtttccctgtcatagttcgtacaacatcggttagcatagaacgatcgaattcagggccgcgcgtataatcgtatgactgccaacgactcacaccgtcagccgctaaatcagcaaagaattgtcgatgaccttcgtacaaatccatgtcaatatcggaagggaacaaaaccctttgcgcttctttagattgctgtttccaccattcgatcgttttttcatctttgatgcgttctggttgtttccggatgtcaaatttgtactttcttcctttagcaatcagttcctgaaaggtaggcggatcataaggatcatcaacaaacggaacatagctaagttcagctagttttccttttggaaacgggccaatactttcataatcaaatacgaaatctacgggtaaatgactcattcgcgaccccgcttatacgattccatgaaataggccaatgatagcgcgacttccggagtaacatcaacggattcgatcatgcctggagttaccgccatcataccgaactgacgaagcccacaacgagcaatcgatttttccagtcggatcatgttttctacagcctctgcgaaattgtccagatgttcccaatcgtggtaatcttccattgtagaacgatcacttttcaaaatcagatcggcaaccaattcagcataaaggcgcggaaggtgaatattcatttaaaacccctcaagcatgtttttgttttcacgaatgttacgacccattttcaaagtatcaatgatcactgcatactcttcaaaagtgaattcgatatcttgtgaaatgtttccccacgtgtaggtcggcccgttaggacagtataacccaacttctttgtttgcgttgacaacgcagcgcaattttgcaaacaacaaattgatatcgatagaattgaacccttcgagataatcaagcccctctctaccaatacggtcaacttctcgcaaaatcttttctacatctttgactttaacaataattttcataataacctcaaagggccgaaggcccttagacataatcaacagtgaatcgtgcgcgggtagttcctacataaagcaactgcttacacaattcataatcggcgtatgcgtatgcatcgcgcgtatacatgtatgaatgatcatacgtgcttccctgacctttgtgatacgtacaaaccggaagcgccttaaccgtctggaacttgtttttgatttgccagaacgaataccagggggctttgtatccggtttcctgtttcatctttttatactgaaacgcgacgtagttcaaataatcgcctaaacgttcctgcataaccggatccgcgataacctgaatatccgctttcgtatcctcgaacatcgattctgttttcatcaagaaataatcgatttgcaccggatcgcatcggtcagctttgatagtatcagaacgcggtatgatttcaaggattttaatttgctcgttgttgttatagataacttcaacaaacgaaaccccattcacacggccttctgtcactaacggttcttgcatcacaacaacttcaccaacaatgaacggctgatcagttttgtacaagtgtttacggatcactgcgtttaacttgtctacgtttgcgttagtgtaagcaaacatacggttattgttcaggtcatccggagtcttaacacggctaaaataacgtctcaggaagtcgccagcgttttcgtgcttcattacccctagttcaccattcatgaggggcattaacggcttaccgtcgcgtatagcgcgtgatacctggatgattgggtttccttctgcctgacgcataatcttatccatgcgaatgacatcaaaaatttcctcatcaaagaacggtgaaagctcggtgatcccttcggtattaacaggacggatctgatccttatcacccaatcccaggatcaccgcacaactcggaatactacgcttgatgatacggaatagttctttgtcaaccatcgatacttcttcaaccacaaacacacgacattcagacagatcagcggcttttttgcctttttgctgttcaaatactcgtaactcttcgttggttacggggctgattttcagtgctgagtgaatggtcgttgcatccatacccaccgcctcagagagaacgtttttagcctggtgcgtcggtgctgtcaaccagatcccactaatacccagttttttcaatgtttcaaacacaaattttaccagagtagttttaccaacacccggcccacctgtgatagtagtatggattttgtttctgatatttttaatcactcgatcatgtgcatttttctggtcttcgctcagatcgtcaaaagttaattcgctcatactttaatcaataccccttgaatacttgcgtgttcaataaaccaacgcatatctttctttttcttttcggttacggtttcaacttcttcctttcgaaagaatcggctaagaccactttgtttaactggattcatcttatcatgatattctttgataatcgaatttttatactcgttagcatcgtccggagatagaaacaacaaaggtgttaactctccttccttaatgaagggaattttaaacccgtctttatccttactaacgacgatataatattttgtaatcattctcgcccctcataacaaacgtagaatattccaacaaaccaaaacactgatagtataatcagtaaaagttttctttcaacgccatttacgtgaaacacacaccaaccgaaaagatatgtggtcatcgcgcaaacaccataagaaagaaccccaacagctactagcatcaaaaagtgccattgatcgataccataaatataataaaggagattatacatgatatcgaccgtaaacacaatagttgttcatgctcattatacaacaacccccgtatttgaaggagatatctacacattcaaatacacttttcctatcgaacagatagttcaactaatgaaaatagacatcctatcggatggatcaccccagcaacaaaacaactactaaggaacactatcaatggactaccgtaaaatttacaccaatcttatagaaaaagcaagaggaagaacactagattgttatacagaaaagcatcatatcattccccgatgtatgggaggtagtgacgaacatgacaatttagtagaacttaccgcagaagaacattatgtagcccatcaacttcttgtcaagatgtatccgcacgataataaattgatatatgctgccaatatgatgtgcgtcaatgcaacacagagaaataataaagcatatggatggatccgcagaaagtggatatctcagatatcaaaagacaggacagggacaaaggcaacagaagaacaacgcaaaaagatgtcagaatcccataggggagacaaaaactctatgtatgggttacgcggtgataatcatcctgcttatggtcaaaaaccctggagaaatcaaataacaatgaaaggaaagcatgaatggaggtatgctgggattttctatgactggtatattaacgatattaaagctggaatctataaaagacaaggacacaagagaatgctacaagaattgcaaattgcaacaatctcccgtgttcctagaacatcaatcgagttattcaaaaaggggtggaacccttacgaagataccgattgggttgagtgggctaataatcaatagctgttggcccaacgacgaagattttcggcttgtttaagagcgtacatcttataaattgtttctgcatccatacccaatgcaataaacttacatagtacaaagtggaattggtcgatcatttcaaacagaacttctaaacgatcctcttcactcagatccgcaaatttagtattgcgcaattcctggtgatttgctttccacggtttccaaacaccggacgcaggtttaacaccgcgagacattccacccagagcggtatacaattcgcgggtttcatcggcgatcgcgtcatcttgcagtttcagccaatcaaggatttctccgcaagtttccagattatccggacgcggaacccaatgcagggtatcagacaggctttgttgtgcatggttttgtaaatccagcatggattgtaaaggatcgccattacgggccagaaccttttgatattcggaatctacaaattccagatcttccgggttaaccaggtgcgcacatgaattaaatacaggagttttatcagtagtcatatcaatctcattttttcggtgatttgtcccacgacttaaatcgaagttttgccgtgagtccagaaacagtattatctttcaaatactgcataatttcaagtttagttgcgccgtccgtttttatcatttcgttgatatctttggaaggccacgggcatttatcccacattacaaccttttctccagcctcaatcaatttaaagaggcggtgagtagtatccggatgacgtgcttcattgtcaagaacccagacacgcatatttttatacggaacctcagaaagtgcaagctgtccaccagtgatagcgccagcattatcaacaaacaggctatctaatggcccctcaagaagataaaccgtttttagcggatctatcgtatcctgtccgtaaatcttggttgattcttcacaggctttgattgtgatatatttcgactttgccccgtcgcgtaaagcacgaccctggaaagattcaattttccctttcttatcgaagatagggatcactaatctcggttctggttttgcgatcggataggtatccggattcaccgtattaaccagttgttgccattcgcgagtaaaccacaaccgatcccacttgtcacgggggatacaacgattctgcacatattttatgatcggatgttcatccggcaaggtatctaacctttcgcagaattgaagagtaggaataaatttcttctcttccttcggttgttctgtatgcgttggctttaacgaattgcgatccttaaacgattccatgagataatcacggtaatcgtctggataatattctttcaggaatacgctaaacggtacaccataaccacagttaaaacaaccacaattcatatgatcaccctttttagaagggtagatccaaaatcgttttttgtacttgtctttcattgagtcgccgcaaataggacaacgcgcattgatgcttaatgcccccgatttacgaacgatttcgctttgaggcagtgatcccatgattcgggttgcaaattctatatcaagatacatttcttacctcagttgactatctttagatcctcgtcgattataccccgcgctgatcatttcgtcatgttctttttggcattcaatacaataacggcaacccttcacgatagccctacgtttttcgggtatcggatccccacaatcaaaacaatgcgttaatgattctccgtttctgatttgagaacgtgcaaaatctatcgcattgtctattgttgcctgaatggtatcttgaacaccgtcagcagggccaaatccaaccgccattgtaaatcctcctaatcaaatgatttcaatatcatagactaagaggatttttctgtcaagaacttacttgcttttctgttccgtcaagcattaacttccaaccacgaaatgcctgtttaaacgaataatttattgcaatatcaattttatcagaaccttttcgacgattctgataaacggtcgcgttgtcactcatatacatgatacaaattggaaaccatgtataatcgttagcagtagcccagatagtgatattcagcggaggaattatcatttctttttccttttccctgcacgggtaacgcctaatactttcggcccgatgttggttactgctccagtagtcacaccagaagcaatcttttctgtatcgccgccagaatcaccagcgaccatatcctctaacatacgccccttatcataatattctttgaggcgcggaacgttcatcatgatttcttcatgctcttgttctgtcagattgtagcgattgcgtagggtatcatatgaacttgttaagttcataaacccagtcatatacggaacagaattcattctacgcttgatatggcgtactgaacgatgaaaaggagaatacgcttctaactcttcttttgttttggggttgcgaattacttcgccttgtccatcaaggatccccagcttgtaagcagaccactctgtgaatggttttttgagtagccggatcatccggacgctatatgttaaatccatatttttaactaattgatcactcatgattattactctattgtgaaagtgaataaatcagatttggtttcaggttcaaactccatacaaacaacctcgcatagtggtttaacccctttccaatcctccaggtaatacccagtatctataccgcatccaggattcataacgaggccagtttcatcaagaaattttttgcatttacttgatgtggtgctgtcatcttgtcggaaacagtgtgttttcgaataccggaaatttgcagacatttgagggattatgaaagttccctgacgcgcgatctgtgatgcacgttcgattactttatactcaaattctgcccctgtatacttacccttaaaatcagaggttttgattttaccaaaaggcgggttactgatcgccatatcaaacacctgattaaattcagttgttaaggcgtctccatgcacccaggaggcttctggtacgatacgcttacctaactcatagtatgtgtgatttaactcaacacagacgatttcacgcggcgtattgtacatcatgtaatgaaccatagcgaaagataacccaccgataccagcacacaggtcaataacacttccacctgtgcaagcatcgattgtgaaatcgcgagcaagtccaataggggtaaagaacgcccctaattcggaattatttgtaaacgcgccttcatgaaagttttcaataatgaacaacttctcttcgtaagttagcgctttgtcagagtgaaccagatccattatctgattgtgtttcttagtctcttgctttgtcaattttgccattaacatcaccaaaattcaattttgcaaaatctccatgaagttctttagcttttgcatcgtacaacaaggcagcaccctccatagtatcagaaagacctatatacatctgttttccgtttgaacgaatatcagcgcggaatttatttccatgcttttgtacgccgatataaggaatatttttccttttagagacctttcgatttcttgaattttctggaagagtacattccctaagattgtctattccatttccagcttcaataccttttatgtgatcgacatactcaggaagtataccatgatggatataataaacaattctatgaacaagatattgcttccttttatatgttacgacatgatacccatctgcgtttttatgtcctgcgacattcccttttcttgctcgttgtcccacatctgcgttccataaaacatcaccagtgatgacattaacacacagaagaggtaataactcaattattccttctagttcttccttaatggtgcgttttgtcatttcaaaccctctttaacacccgctttcgttaactttgccattgtcccagctatacaataatgttgattcattcggatagaattcccatccgtccacgtatccggtttcccagtcagtagtttgttcaaaaccacagatccattcatatacaccaggaggcatttcgacagaatcaggaagcccgatatcttccgcgctgcgtccacattcaaagaatgcatcatgaatgaatggtcgagataataccgtaacataaccttcatcgtcaacagctacgatccagcgcgaactatgaggactatcgaacttcggttcttcttcgtctgcgtcagcttgcatttctgccttacaaaaatctaaatttatcatttcaaaccctctttaacaccctctttcatggctttccaggtagaacctgcttcaccattcagggcggcgaatacaaatagtaagatagcaaggacaagattcacaccagcaatcaccatgattttgctatacacgaaaatgtaaggcattgccaccacccaccaactaaaagaattaccagttacgatgttgagtgctgcaagtaagaaagtgataacgaatgcgattttcataatgtcctcctttgttatgattaaggtatcatcttttgcgaaagaatgcaatacctacagatacaaaaaagcccctttcggggcttattttttatgcgttattgatgagataccgaagaacgtttttcgcttgttcctcattacaaccaactttgaaaccaggttcgatagggaggaagttccagaggaaatcaacacttccttcaacgtcatctttgcctttttccagcatcgctaacagcaaacctttgtttttgatgctgtttacgattgcgtcaaaataaccatcgctgaaatcaacattcgggttcagcatttcgttgtaagggttgttgaatacgttcattttgaatctcctttgtttaactcagtatcttgtctacgtgagttatattaccacaatggagattcaggtcaatacctttttacgattttttgaaaagtttttcgtatttggcttttacccagcgatacatatcttcggccttgtcactggcaatcagtgagaacagcagatagatcgcaacacccaccaacacaacgcctactacaatgtagacgggtaatagaactgggaagagaacccagaaccatgacatatgcgagaagccaaatactttagccgctgcaaaaatcagtgtcagtccagtcagaagtttgatagccggaatcggaatcgttatagtcttagtcatttcattaccttacattctttatggggctattcgccccagtcaattaaaattgaatgtcagattttgcaatctgcgccattttttcacgtcgggtagattcagcctgtttaatcatcgggccttgtgtctgttctactgttttaggcatagtattgccgtggtagtcagatttaaacccgtattcgctgttgtcggtatccatccagcgctgattaccttttcgaacttccaacttgaacttgttgaaagtgttcttatcgccataacgggatttgatttgcttgaacagttgcataccctgatcagctaactcttccgtctcgattacagctaacataaaatcagccgtagcaggtaaaccagcggattccgcaacatcacccatactcacatccgaactatcccatgcagaacgcccaacctgtgcgcctgtccacatcacggtattagtttcaacagcaagaccgcgtagttcttcggcaattgctttaaccagaatataggtattttcagcacctttaacacgggttgaagtacagatccccaggtaatcgacaatgatcacatccggaacaaactgtttcttcaatttaagctctttcacaagcgctctaaagtggtttgcacctgcacccgatgtagggtactgcttaaccaccaaacgcccaaccttacccgctttaaggcgctccattttgttcttatagtctgcgtatgtaatgttcccttcgtcgatgtcatccatagtcacatcaagaaggttagcatcgatacgcttagagcaaacatgctctgccatttccatagaaatgtaaagaacgtttttaccctgttgcagataatcagccgcaagagaacataagcccagtgatttaccaacgttaacaccagccatgatgatattcagtgtaccacgttccgcgccgcctttggtgattgcgttcaggatcgggataccaaacggaattttcatcgccttcgattggtaaagcatccaccgtttttcataatcttcgaaatagtcatgacctactgaactatcgaatgaaattgctaatgcttcctccatgatttcagggatagccccaacaccaggaagtttcttgttctgttctgccagtggtttttctgcgttagcctggatctcgattgcgcgagaaagagcacgatacattgctttgtctttgcaatatgtttccgtttccttcattagccaatctaaatcttctggcgcatttttcagcgactgaatcgcctttttcgtgtcttcgtagactacatcacttagatttcgtttgtcaagcgcaacctctaaagcagtttttgacggaataccgttgaattcctgtacatgtttatcaatgaggtcaaacaaaacttgtgcattgccttcaaaatattcctttttcagatgaggccatgcttggacaaaatacgtcccgttataaatcaggttagaaaatattgtatcaacgatcattgtattgccttataccaggttgctgaacatcatgaaaaagttgtaaaccttttgtttgaatacatcccataatgtcagcttaggctttgggacaactgaatccttttcaagctctttaatctgtgcataaattgcatcatgcaccagcgggatcaacgcttctttgtcttcgtctggggtactgaattctactttcagaccatgatcccaaaacaccttatgaatataaaccagatgcgcaacacctttttcatcgttaatcagaagttcctgaataacatctttcatcgcttcatcaatataattctttgctttgctctcgatatccatacattgcctcggttatggggccgaagccccatagtttttataaaatttcgttgtcttcttcgatatcatcaaatgattctgggatatcgtcatcatccagatcaggatctgggatgctatcagtgctgtataaatcttccagcgcggaaccatcactgatttcacgatcagggatcttatacttttcttcgatagctttcaagaatggttgatgagtaaacagaggacgccagaattcaacgctatttgtttctgactcacgccatttcttttcttcaacttcgagttcgccagtctcggtattcaggaaagcacggttgcgccagcctttggttacggtctgtacaaagttcatttccattgccagatccagaaggccagaatacatactaataccgccttcataggtaacatgcagcgggaattttgatttctctttcacgaatcgagatttttcgatgttcatgatgaaatcataacccactacctcagtaccttctttcacctgttgtttacccaggatgatcgcagtatcagcggaatacattaaaccagtaccaccggaaataactttcttgctgtacatttcttgtgtgtcataggtatgacagatacaaaccatcgggatatccaggtcagccagataaggcgtaaccatacggaacataccttttaatgcttttgctcgcgtcatatcctgtttatcgttatcagacagcgcgtcagcaagttcttttttacttgccgtgttgcctactgagtcaacgaatacaatcaccttatcaccgcgttcaagcgcgttaagctggcttacaacgtcattacgcaactgctcgaccgtcgtgatacgagtatacacaacacgatccggatcaacacccattgatttcagataggatttagtaacacctttttctgaatcgtagaacaggcacacagcatcttcatacgttttgagataagccgctacagtcagcaaacctaagttggatttgaagtgtttggacgggccagcgaaaagggtaagaccagaagttaggccaccgttaaacgcaccggacaacgccagattcagaatcggcacacgggttcgcgtgatggtaatattgttgaatacgtcgctttcagaaagtacagatgcagtttggctattcgagtttttgatcagtttttttagtagtgctttgtttgacatttaatttttccgatttattcattctcattctatatatctcactagttaatgaaaggggccgaagcccctagagtttaccagtcaccgaacaggtcgtttaaactggcacgtttttcataatcaattttacatacttccgtgatattagtcaatggactaataacatgtttttcaaacatacccggataatctacccatgccagaatatcactttcgatctctgacggtagtttatttccggattgccacgcgatgcaatcggcttgccacgggtttttatcccttagtggtagaaccattaccttttcaccttccatgattggcgtaacaccatcaataccagcagtgaaacggttaaagaacagcacccctttaatatggtttggtgttcccttgattggatagccagccccatcacgatatttcgaaatgttgttagcagatgatacaccagcaatttccctgtagtcaagttccttatattcttcttcgaactttttataatgttcgtgcaaagataattcaccttcttgcaggatacggcggatcgcttctttcaggaatactttcacagaggtcggagtactcgatcgctgtgtttccatacccatgattttcagtttcggtttttcatagcgggttccttcggagtcccacacgttagccgcatatcgttttttagcagtccagaaacttcccaacccttcggaacccaacggaggcccagaaatgatttcacgatccataaacatcaggtgttccacgttgttcatgtattcgcaaagttcacgataccctttatcgatcatcggttccattctttctttagcaaagcgatccaggaagtcaacccaatggttattatccttaaatttagcctcaccaccaacttttgcaatcacgttatccatgcaaacataaatggagtcagtgtcacagtaccgaacatatgcatgatccgtagtaccgcacaggtcgttaaggtattcgtttaccttacgttcaatccactggatagccaactgcccgaacatggtgatcgcgctggcgtttcgtagatcgaagtatcggaagtgttcattacccaacgcaccataaagggagttgatagaaatcttacggttaagctgtgcggtgttagcttgtgcgatcttcttctcacacacgcgcttaactgctttaagcatttgttttgtaagagttttcagaactgctttcgattcatcactgaaatctgtatagaaatcaaagtcaggatcaaccatttggttatgcgcgtctgttaagtgttcgagttcgtgcttgatgagttcaagatttcgctcacccgccatcattcgttttttccacatcttacgctgatcaaatactttcttgatctctactgggatcacgcctttgatatcacggcggaacatccacccgttaggagaacagctaaattcatcgctagggcgcggcgcggtcttattaatatactcttcaagagcacgtaccgcaaaacttcccataatcgtttcagggcttatattcacctgtcggatgatggaagggtacaggcttgttaagtcaaacgataccatgtatttgtaaggcccaggaactggatccttcacaaatgccccagggtaaggggttttagtatggcgtctgttttccggaataacaaccttatcttcacgcagagagttataaatgatcgcgtcccacgttttcagcggagacataacccctgggaagttaatttttgcatagtacgctacagacagaaccagttcaataaagtttcgtttaccgtcgatatcaagtacgcggataacgtcaacaatgttgtacgtgatgtacagttggtgatcgcgctggcgtagttcagacagggaaccttcatactcaactttatttttaccagtttcgtattccgcgatcgcgtccaggcggtaagatggttgcggggtaaagctgaatttcttatacagcgccataccatccatttgagcaacgccgaaaatatcatatcctaattgttcgttgccgtaagcgtcagtagtggttctggcggttactttaccaaacgggctaaaatgccttaccacgttttgaccgaaaatgttcaggtatcgcgtgatgatatatgcaatatcgaatttgtcagagttccatccggttacaataacaggggttcgctctttccaatctttgatatacgcagacaataacgacttctcggtctggaaagaccgataaacaattttgtttaaatcttcttcgctaatgtctttgcgatcaacgttttccgcgcaccattccgcaaggccaccctcaaccagatcgtatacatagaatttatcttcaatgctatcgtaatgggtgatcgcatcgattggatattttgcttcacgcggatccggaaattctggagcggtcacctcgatatcgatagaagcaatgcgaatgtgttcgcggttgtattcgatttcattccggtacatgtcagaaatgtaagccagtcggtaatcgtccatacctagcgcttccatcccaacatcgcgcatacgctgcatccagtttttagcttctttgatgctgtcaaactgttttttgaggcaaggcttgccgtaaatgtctttgtatggggtttctacgccattcatagcgtgttgatacattacgggcgcatatttcgtcttacgtacctgttcggtgccgttagagtcaacgaagcgctcgtaaatggtatctcccatttgttcaactgataggtaaaattcattcattggatcttgtattctccattaatataatgttccattgtaacactacctacagcaaattcaagtttactcgatgttctaaaaccaacaacccttctgctaacaagtcacggatctttctcagttgaacaagctggcgttcaagtttaaacccgtcgaataacatgctaaaaatactggaattgatactatgatattttgcttctgcaatgccctgattaaccatcatgatagctttgttaaccagtagtttcctttccgttactgtatgttcatccagttgacaggttgcaagggaaaccagatcatcataagcacgttgatcaataacgttatccatacgggcagcgaaaattttattcatgtaagtgcggatcattgcgcgtcctccattcttttcataaagacttcttttgcttgttggatcaagtccagagattttttaatacgctcatagaaataagtggtttcaacttgattgcataacaatgtgtactctgaaatgttacgatcgtaaaatccaggaaagtagtgttgtgcatagctgtaagtgcgggtatctgacagattgcaagttaacgataacaagatgtcatcttttacaatcgggatgatcaaagtttcgttggatttgattgaatccatgatttcgttaatagtcataatatatccctctcaatggtgtacacccaatataacaaagcccctgcacgaatgcaagggctttttgattagtgaccgatccggtacttgtacttgaggatccaatctgctttttgcgagtgagtcagtacgcggaagttgttttcttctgcaaacttcaacccagtggttacaatcttaaccatgccccactcttcgagaagtcgcgcaatgttgttccggcgtagttcgtcttcttccgtcatatcgacttgacgaccatcgagtttcaacagttctttaaaatgcacgataaaatacttaccttgctttttcagaatgtggcacgattgccagagcattttctttttgttgtttgcaataccaatacgggttagcgtttcacggatctttaaaaaagaatcgtcgctgattagttgaatttctaacatacatcaccattgtttaatcaatttttccaatttcttttgttcagctttgtttttcacaatacccaacaaagacagagcgacctttgcgtgttttcttttccaatcctcgaacattccgaggtctttaagttcctgcaaatattccatcgctgtacgtgtatttacactgtatttttcgcgaaggatttcgataataattttctcttcaaaatcttccgatagtttagcccatgcaccgaagcgtttagccttcctaacagagttgagataatagttatagtgcatttggtcagagatactaccgcctaccagattcatcacataagcgttatatatcgtgtctatgtgctggctcattgcgttgtctacaaagtacttatcatacacttcatcgataaccaacggagttttgccgttgttgatttcgtctatgatgttaaacaaggtgttttctttatccttgccgtactctttgaccagttcttcaaccttatcccaatctttagaaagccaagcggattcatgcggggataactcttcttcatccagaaattccgccaggctcatgattacgcctcccagaccatagaaagcatcaggttcatcaacagatattgcagatgaatttctttattcatcgccagcccgtattgcgcgttgttttcgcctacaatctggatcagtgcgattttagaatcctgattcacgatagggtaaatcgtatcagtcaattttccgataaaggtatcgtattctgacgcatatttaataacctcagagcgcaaccctttatagttcttttctttcaacagggtaatgatatgagacacatcagaaccaacgatctcatttaggatccccgcatcaatttcaccacgtttcgagtagaacccgatcgctttgataatagaacgcgcatccggataatgctctttaacaaacgctgcaatgactttaggatcatacttgatattctcgatttcaaggataccgaaacaacgcttgattaactgtttcatcagttcgatacgttcagcatcagacggaacaccgaatttaacaggaggacaacgagaaagcagagcactatgcacaccgttaatgttgttcgctgttacaataacagaaacgtttttactgtatgcttcgataaagctacgcaagtgtttctgtgcttccgccataccagaacgatcgaattcatcaatgatgataatctttccgcctggtttctgcgtcattgatgaagcaaaacgatccagttcattacgaatgaagtttacaccacagttcgaaccgttgacaaagaacacctcagcatcaacctcacgggccaacacaagcgcgagggtcgttttaccagtgccaggggaatcagatacaagggtcatgttctcaacacgcccagatttgattatgccccgcatagcggctttgtcaccagaaggtaaaatacactcttcaatcgttgttgggcgatagcgctgatcccatgcaaattcatcaggagatcgggagattttaccgtatttggtttcgatgatttcaatattttcactaagttccataatataccttcaaaataaatggtgtaaaagaaaggggccgtagccccttaaaactatcttacttgaatgtgctacttgcttcaagtacgacgacgtaagcaacgccgttatcagaagagaattttgcggcccctttggaggaaatctctactttgtaatcgctgttgatgaactgcatgttatcaatcttcatatcaaaattgaaaacattgtcgccttcatactcaccgacttcaacggagaaagttgattgactttctttgcttttcgcggtgatgaccagtttaccatcaatcggttcaacggacaggtcggtcagtttcatcatgcgagacgctttgatcagtttttcgaaatcgttagcggtaatctggaaaatcagatctgctactggcatcaccagacgttttttcggtttcgggatcgttgttgcgtctgctgaacgttcaatgatcttcatcttgtcgccgcgaatcacgatttcaccagtggaaatatcatgagtgatttccgcgtcagtgccgacgatgttcagcatgttcaggaatgagttgagatcgtagataccaacatcttcatcaatcacatcagcaatttcagcttctgcgtatacaacgctgttgattgatttcgtcatgatgaatgaacctttggtcagcatgatcgaagagttgatttgagaaaagtttttcaggatatcaatagtttgtttagagaatttcatattcagcctttagttttcaataagtgttacttaataagtgattttacaacggtttccgctgctgtgtcaagcatatcagccatttctttaacggttgtacgcttcggatcttcgcggcgttcgctggtaagtttacgatgttccgcaaccactttttcatcaatgtcacgatagtgtttaaaacgttcctcttgaggcatagctttaaacagttcttttgtttcgtccgagagtttagcaacccaggatttacggacgcggttcatgtagtcaacaaaaacattactttcattcatatatttcttctctaacttagaattctttgagtgggggccgaagcccccgcttgtattacatgtctaacagtttatccaggtcgtcatcaccggaggtatcagaatcatccaggtcgaacggtacgccgtcatcttcgcctaccggaaccgatgcaacaccaccagatgatttcacatcagatgtctgattgtcaaacttagccatttcgttatcgaagttgctcagttcgctatcaaggtcagcggaagcgctggaaccagcagaaccgatcgaactacccataactttattgaagcgagtggtcaggtcagccagcggtttaaattcgctttcagcggtgatcgggcggagatcgctcataccttcgaaaattgctttctgaacttcttcatcgtcgatgtttttgatcttagccggaacaccaaacgaactatcgtcatagttaggccaatcaccaacttttttcgctttcagggtgaagttagcaccatcaaacggacaggttacagcaatacccggttcatcaagttctggattaccgttaattgcggcggtgatcttgtccatgattttcttaccgaagcggtatttgaacaccttaccttcgttttctggagcgcctgggtctttaacgatcaggacgttagcccagaaactttgtttacgaccgatctggctcagtagcttatcttctggcccgtttttgttggctttagccttctcatacagatcgttttcggaaatgtacttacatgcaggacagccgtcataatcgccgtgggtagaggaacagttctcaatgtaccactggttgtttttcttgaaagagtggctcacgatacggacgaacgccagttcatcatcggaacgtgctgggaggaatcgaataacggcggaaccgtttttctgtgcgtccagggtcagtttccattctttctcatctttctggaagccggaaccacctttcagatttgctacctgtgcctggagtttagcgggatcttgacgtttaaaaatgctgctcatattctgttttctcgtttagtttagtttgattaacgtttgtttcattaagtttcgatattttatgatatctttttcagtaaggtcaaatatttttctgtatgcctttaacttaatgctaaagtcagaccaaataatatcatcagctacttgatcgtgtttatttatgatacctaaaaatgagtcaaaaatcaaaaacgattcgtaagatatcacatttgacaggacaagtttgcttatgtaggacgttgatgatttttcgctgtacttgaacaccagagacacggggatctctttcattttggcgaattcgtacacgtttttaacgtcatccacaaacacgttatctagtctttgtaactttcctatgtactgcctgtaaaagacaatactatcttcatcaacatcgcctacccagaaatccggattggctacgaagttggagaggaatataaaatagatttctttgaatgtaaagcgttgagctaattttacaaagaaatatctatcctttcgcttgttaaaggcgttttcactaactttgatctgccagttgtattgaaggacatcaaaacgcccctggaaatgagttttcatcgccagatataacttgtatacagacaaaggcacaagccgtgaattcgcctcgctatcagcaaacggagctttgaatctcacatgaagccgtccagagtggttgatgaactatgttcaagcgcaaccgatgggcgaagcatgtttcctttgatcgcttcgtcgctaatcttatcaaggatcgcgcgaggaaccgttttattcagcatcgcataatcaatagaattttcatccatccattgtagcgttgcttccatgtaggttgccccctcagaggcaaccagattttcgatatacaaaccgacttcggtcttatttccgatcatgctttacgccttatcgatcatatcatacagttcgatcagttcgttgttttcttcttcgaaagcggtacgggcctgttcgtgatacagtttgaacagtttcccgaaggtttttccatcgataccgaaatcagtttttgctttggatttgatatccttgaacgtaccgttgaagatctcaacttgagttttcacgttggatgcttctttgatcagttcttttacctgttttgctacatcagggtttgtttgtaaaaattctacactcattttgttacctcaaaaatcactcagtttttcgaacatacgggaaagtttgttatccatgaagtaacgttccattttggctttacttccggattttggagtattatacgcttcaataatcgaattttcaatatcttttggtataaattcgaaatcgcgcagttcctcattttctttgtaacgtgcggcccattcaggggtcatcaatgttgtcggatcgtctgcctccagccatgcctctaactcagaggattttaccgctggggcgcgttcaccttcaaccttcgtcacaatataatcatttctaattttaatgcaagcgatactatcttttttatcgcctttgatatttttgtatcgcagatcgttacgtggcgaaccgtacttaggcgttacccattttttctgggtaggcgaccattgacgaacaccgttatatttctgtagttgtgtaaagtcgctatcagcagaaaccactaatactcgtctaccttcaccaacagcttttttcgtaacaacagcaattatatcatcagcttccgcgaattcaacctttaatccgagataaggcatattctgacggatttcttcgaacaccggattcaggaaattgttcagacgatcccaatcccattctgattcttcgtgttcgatctgacgacgttttttgtagtaccaggctttttgcctacgccagtaatttctgtcatcgaaggcaatcacgatttctggatactcacctttaaattttacaacgttaaaccgtaaagtgtcaagcaccagatgacgaatcatttcgatcgtgatggatgcttgttcctttggtttgaagttgttcatcagtgtagcgatggaaatgttagagatatcgatgaccatagtatcatcgggttccccttcatcttgcatcagcttgttcaagttaaacatgcttgcaaaactgctcatacatacctcaatttttcaaagaacggggttattgtagtaacttacgaaatgaagtcaatacaaaagaccataaaaattttgatcaataatacttgatctgatcaaatttatgatctataatttattaattaataattattttactacaatgatcattgtaggtcaagtactaaaatcaataaattttatataatttagatctgatctatagatcattagatctactttaaccttaaataatatagaatgaaatttgattttgtctacagttattatataatattcttaacttcaaagaggaaatatgaatactatgactaaagaaacaaccaatatctacgcagacaatgaaaaattataccctatcctctgtgcatggaaaaagcaaatcgccgaaacaggtgatcgcaaaatgcctaatgagttgggggctgctattatggatattgcaaacgggctatcacgtcgttacaacttcaaccgttattccgaagattggaaaatggatatgatcgatgacggaatttccgctgcaatctcaggactgcataacttcgatgaaactcgttataccaacgtttacggttacattaacaaagcatgttggcaagcattcgtaacacgtattctgtacgagaaaaaagagaacgcgaagaaatataaattcttccttgagcacgtttacgactgtgaagattcagatatggttagtattgcagacgaaggtttcattcaagatctacatgacaaactatctcagtacgaggcttccgccaccaaaaccaaagacaaggaagcggaagtattcccaacattggaagattttctatgaaagcaataattgacttaaacaaaatattaactgatatcgattacgaaattgacttgctaccctacttcgtaaaattagagttgcaaaacgtgggaatcccggttatcatcgatccaactgacgtaagaaaccccgatttcgaagtagaagaaggggttttgtcttatatgataaacgccgaaactatgatcatggagatcacttatgattgatgaagagaaagaagtactaaccagtgtggaagaagtggatccagaagaggaaattcgacaaaagatccaggcacgtgtagaagccgacgcattgaagcgagcacaaaaattcattaagaagaaccggactgagatcaaacgcctccgtagacacgcagaggaagccctattcaggggtaataaagttcagtatgtgtatgcggttaagaaacttcgtgatatgctcaaacagccgtatacagaggatttcattgatacgatgtggaacacttcactagcatcaattcgaaatatcgtagcttcacaacagaagcactaacaaacaagtagccccgaaaggggctatgagggtcttatgagaaagtacttaatgatcggggatactcacgctggcttgcgtcaggacaacccctggaatgaagaaaacctatacaatgtattcgtacaaatcgtagaacactgcaaagcaaacggcattaccgaggctttccatgctggtgatttctttgatgtgcgcaaggccaccacacaaaccacgatgaaattcattcgtgaacgtattgtgccactactggaagaagccggattacatatctatgttctggttgggaaccacgattgccagtttaaagacaagatccgccctaactcaccgcgagagattcttgatcagtatgattgcttcacggttgttgatgaaccgatgacagtaaatcttgatacttctccgctgcaatcaatcgatttgatcccgtggatttgtcaagaaaacacacagcagatttttgatttcatcaaaaagtcaaaatctcaatactgcttaggacactttgaactgtccggatactatttctataagaacagtaaagcggaacatgggcttgaacctgatttcttaaagaaatatgatatcgtgtattcaggccactatcatcacgctaacgaaggcgctaacgttttctatatcggtacacctcttaccatgagcgcgaacgatgaggacgaaaccaggggcttctatgagctatcttatggcgacggtaaacgtgaattaactttcattgctaacccagtatgccaccatcgccggatcacctatccggatcaaaaagatgttgatgttgtagattacaaaaattgctctgttcgcttgattgtacgcgaagttgataacgatttgcctaagtttcaaacaaaactggaagaaacagtttatgagttgaacattgtcgatcgcgtgatcactgattcagaagtcgatactgattttgaaatcaaaagtgtatctggattgattagtgagtacatcaacaacatgcagatcactccagaagaaaagaccgaagtatctgcaataatgagtgcattgtatgcagaggttacgagcaatggaaatagttgattacgttaatattttaaacgaagaagggcgatataaagccctttataaaatgtttggatttgatgtgattgttgcagtacagcaggattcctataacgagtatgtgtcattggggttcactctgattaaagacaactatcacgaaacaaaggtttggacatttactgtcctgaatagcatggatgaagattccgtgatatactgctttgatagcacgattacaaacatgattagtgatatatcccaaaggataattgatgaaactcaaatttaaaacattgacttatcaaaatatcttgtcggttggtaacgtaccgatcgtcattgattttgattcagcaaagaaaaccctcattacgggtaaaaacggcggtggtaaatccaccatgatcgaagcgcttacatatgctctctttggtaagtcatttcgcgatctgaaagtcggacaactggtgaacagtatcaacaagaaaaaatgtctggttgaactgttgatcgaatacggcaatgatgaatataaaatcatccgtggacaaaagccgaaagtatttgagatctggaagaatggcgaaaaactgccggaagattcagccgctggtgattatcagtcacagcttgaatcaatgttgaatattaacctggtgggctttaaacaggttatcgttctgggtactgctggttatgtacctttcatggaactgaaaacaccagatcgccgtaaacttgttgaagatttgttgtctttgtctatcatcagtgaaatggacaaactgaacaaatcatacatccgtggtgttaaccgtgaactggatacgctttcaatgcagattggacacgtacaacagcagatcgcaacacatcaaaagttcattgacgaacaacgggcaaaagcaaatcagaatacggcgcgttaccaggatatctacgattcccacgtagaaacagcaaaacagattaaagcgcaattagttgaacttcaaacccagatcgcagaatgtgtgatcaatggtgaagaccaaacagcaaatattcaaaaactgcgtgatggctatacacgcctctcaatgagcgtagaacagttgcagcgtcttgaggtgatgtatcgcaagggtggtgaatgtccggcctgtaaacagccaattagccccactcctgaacgcatggaagagattgccgagaatattaaaaacggtactcagaaacttacgctgattaagaacaaacaagatcagctacagaaaatcatggatgatttactaacacaacaacgtacactaaatgggctgaaatccaaatacgaatcactacgcggtacacttcaaaatgaagttgcagcggctaaacgtgttcgggctgtcatggataaagcacaggaagacgtggtgatcgacgaatccccagttgaaaaactccgtgaagatgaaaaggaacttgattccaaacgttctggatttgtcaaggaaaaatatttcagaggtattgttacggatctgctgaaagattccggcgttaaagcgagcatcgttaaacgttatattccttacttcaataaacagattgcgtactatctggatctgttgggtgctgattatcagttcactctggatgacgaatttaacgaatcgattaaatcgctgggtcgtaatgattttagttacgcatcgttcagtcaaggcgaaagagcacgtattaaccttgctttattgttcacctggcgcgatgtaaccagtaaaatttctggtgttgatttatcccttctgatcctggatgaagtgtacgatggtgcaattgatcgtgatggtagttttgccgtaaaagcgctattggatgggataaatggtaacgtaattgttatcagtcatcaggatttagatccggaagatttcgaccgacatattgttatgtcaaaagtcggtcgattctctaaaatggaagttaagaagtcttaaacttgcagttatcaaaatgccagcgattcatattgctggcatcaccagatttattgcaatatggacaaatcaactgtttcctttttgcttgggtctttctatctgggttatttctgcaatacggtatatgtgaacgcagataatgtaatgaagattctgttccgcaatatggacaattccccctttctttaggtacgtttccgttcttatgggaacacgggataccctcgaacttatgtttcaatccttcattacctggtttcagtttacagttgtcgaagtgccaacgagtcatatttccaattatacctgattttccgcaatgaggacacacaaccctttcttgttgctttttggctttactcattcgctgtctggtttcttcggtgaactctctattcctatgtgcttctgacgcctttttctttaaccattcatagcggcggttagctgttctttcctttgatctattggaaccaactgttaacatatgtgctgcaaaaacgagtttgttgtttcctgggtacatcttgactaataacagatgcgcaatataatgttgacgtgctgtaagattaaccaaattatcatcggaatctgttccgcctatgcacttgggtatgatatggtgtgattctgtatatccatcatactgcgtttgtttagcatgttctatgatagagttataaattttgttatagttcataaacatatctcttgtttgatgggccgttagatatccctatttaagaggatgaaattatgctattagaaaaatcttttgaattagaaaccgctctggaaatagatcggttttatctccacaacaattttcttgaagaaaaacatatagttactatgaaagatgttgaggaagcattcaaagataaccctatagagttgacgcgaatcaagaacaacaaaagttctgtttggttcctcgaaaaaatctattgaccgaaatccataaatacagtaaagtagcccatgtaacgaaacgtgggctttgtttttatttgaggaacaataaatgatcactgaatccaaaatgacttatcaggaagcactgaaagttttgggcgcaactggtagcgaaaccagcgccgaaatgtccagactcttcaaacgcgcatccttacgcaatcaccccgaccgtggtggtagcaatgaattaatgcagaaaattaaccaggcttacgacgtcgttacaaaaactgggcctagtggcgcacgttctgagactgctggtgacgttcgcgcacgttatgcacgtcaaaagaaagaatgggaagaaaaagttgatgcttactttgtagtggcgaaaaactatttcagcaccaaatttaacgcacaggaatttgcggaatacttcaccaaatacactggattgcctaccactttcaaacaggaagtaacaaaaggtagtcacggtgtttatgcttcgttccgtttcacttctggtgatgcttactttgatttcggtttcaactgcacccctccgaatggacaagggttagccgctccggattcatctgcactgggtaacgtttctgttagtacctttgtactggttggaactaaaaaacataaaatggcaagccgtgattatcaatggggcaaaaacccagataagatcactccggaaagcctgttcccgtctaaaaaactggaaagcattttcagccctgtacagaaaaatatcaaatacaaacgtgctgattaccttgcatcattccgtaagctgttaggcgctgacattagcggaaacgatatctttgttgaagttggtacactgaaagttcgtttctatcgtcatgtaatgatgcgtaaaggtgcgtatgtgtttagcgcggtgtatgatcctgctgtatctaagtatcgtccggctgcacaacttcgcggaactatgttagaagacgaggacggcgcttgcctggatatgatcgttgatacgttcaaagagttgcagaaactgaaaccgagtgttcaaggcgttgtgaacgcgatcgataagatgaacgcagagtttgcggcggggcatcgttcagcatcttttgttaaacgtgtagctgctcaggaagccgcaccgaagccagaagagaagccaaaacgcactgttaatcgtatcggtaaagaggaatacttcgcagcactaaaagatattggtgctcgtgtaatgcctaccagcggttatgttgaatttgataacggcgctggtgttactatcaacttcaagcgtattgttgtaaaccgtaaagcatactactcattcagtagctttgatttcacgtactctggtcagaaacacattgagtggctgaaaggaatcgatatcgcagaagataccaaaggcgcaagcattagcctactcactgatactctgaaatctttacgtgggatctctgactggaacactgttaagagcgctttagatcaaatgaattctaacttcaaggcgggtaaattctccgcacctcatgtgaagaaggaagcagagcaaaaagcaccgaaacagaaagacgaaatcggcgcacagcctaccaaaccacaggcggctaagaaagatacaccagaagtggaaaaatcacaggctgttcatgcagcacgtgagaaagcgaatatgaacaacactattcgtaaaatgatgactatgttagtcaaagcacagcgcaaagacactccggaagatatcaagaaggaagttgatgcagcaattcacttgtggcgcttgacttattaatcaaatgaactataatgggaactgttaacgcagttccctttttatttgaggaaaatattatgagttgtccaacatggttacgtttggaaaatctgaaagaaggtacacaaaaacggatttatattaatcttggttgggttcctcctaccgattttcaaatggctgagattttaatcaatgctgttaaagaagtaagcgacacttacgaatgggaaaggctctattttcctttgattggtttgtatatgacgcgaaataaatttgaagaaatgaaacttgctgttattcgcgctacgattattaattcccaacaaagatttactttgaaaaatgcatggagttctgaatgattattcaagtatctgtacagggtgacactctgactgtcaccgaatccatcaataccgctcttgctgtatgtcgtgaccatatctcacaaaatcctccagtgactgagatcctggaaattgatgtttgggatcagattgggatgatcgacgcatcatatggatttaccccgcgagatgaagaactatctcgtatcgaatcatggctgaatgaacaggaaacggaatgaaactccctaagaacacaacactactaacccgcgaaaaacttcactctgttgattggtgtcctctggatatcatgatttttgatattgaatctcgcgtgatcaatgcaaaatatcaggggtgtagtattttctctgttgaattcgagaagattcgcgggtatgatgagaagtacaaagaaaaactgaaagttatgattgaagcattgggctatattgtaactgttgaagacaacaaaatgtggatcgcaatatgagcatagtaaaagcggtgtttgcattgggaattgatatctatcacgatgatttcgcttttggatatcagcaagggttgccgtggggccactgtaaagaagatttgcagaacttcaaagaagaaaccgcagatagcgttttgatcatgggtgcaaatacgtttacctctcttccgggtaaacttcctggtaggatccattgtgttctgtctggttcaggtagttttttgaaaaccaaaaaaggcgacgttgctgattacgtgatccacggtggcgggttgtctgctgctattggtacaatgcaagcaacacacccagataaaaatgtatgtgtcatcggtggtaaggggttgcttttagattcaatcaataataaaatggttgatgaagtaattttgacaaacatttacggacatcatgtgtataacgcaccagcgtttaaacgtgatgttgcatttactctttctgaactgggtggcgcattattaaaatatgaattttctgatttaaaaactcagtacataaaagaacatgaacgcattgaaaaaatcgtagttgaacgatataaaaaggtataaaatgaaacaatatctggatattattaaacttgtacttgataacggtgttgaatcaactgatcgcactggtgtaggtactattcgtattttcggcgcacaagcccgatgggatctaaacagaggtttccccgcaactacctgtaaaaaactattcttcaaaccgtgcaagcatgaattgcaatggttcctgtccggttcaaccaacgttgaagaacttcgccggatgacctggggtgaaaatagcgataagcgcacaatctgggatgataactatgaaaaacaagctattgatttaggatacgattctggttatctggggccaatctacggtcatcaatggcgttcgtttggttctctttatggggatgatgatagttattatggcggtagtggtgttgaccagatcgcaaaagtcattgaacaactgaaatcaaccccagacgatcgcgggatcatcgtttcggcatggaaccctgttgatcttgatgatatggcattgcgtccgtgtcactgtttctttcagttcgttgtaatcaacggtaaactgtctctacagtggtatcagcgttcagttgatgtcttcttagggttgccgttcaatatcgcctcctatgctctcctgacgcatattatcgctgatatttgcgggtacgaagtgggcgatctggtttggactggtggtgatgtccatatctataaaaatgcggttgaacaggcaaaagaacttttacagcctaaccgttcaccaatgccattaccgattctaaaaatgccgaaggtaaatagcttacttgatttagatcaagaattctttgactcgataaccttagaagggtatcataataacggctctctaaaagctgaaatggcagtatgaaaaatggggcttcggcccctttcttaacaaggtaagagaatgaatgacattaaagtagtagtaaaatcctctggtgtacgccagccgtttgacaaagaaaaaatatacaaagtgctcaagtgggcctgtgatggtcataatatcgatgttcgtgcattccttgaaaatgtattagaactgatccgcgatggtatgactaccaaacaaattcaacgtatcgctatcaagtatgcagcagatcatatttctgttaaagaaccggattggcaatacgtagcatcgaatcttgaaatgtttgcattgcgtaaagacgtttacggtcagttcgatcctatcccgttctacgatcacatcgttaaaatggttgaagcggggaaatacgataaagagatcctggaaaaatacagcaagcaagatattcaagttttcgaacgtgcaattgatcatgataaggattttgaattttcgtatgctggttcccaacagttaatcgggaaatatctggttcaggatcgcgatactggcgaaatctttgaaacccctcagtatgcgtttatgcttattgcgatgtgtctgcatcaggaagaaactgggttagcacaggttacgcatatcgttgatttttataacgcaatttccgatcgcaaactgtctctaccgactccaattatggcgggtgtacgtactcctacgcgccagttctccagttgtgtagtaattgaatcgggtgattctcttggttctcttaacgctgtaacctctgcgatcgtgaagtatatttcacaacgtgctggtattggggttaacgcgggacatattcgcgcaatgggttctaaaatccgtggtggtgaagctgttcatactggtgtgattcctttctggaaacatattcaaaccgctgttaaatcctgttcacagggtggcgttcgtggtggtgctgcaacactgtattatcctttctggcatctggaagttgaaaaccttctggtgttgaagaacaacaaaggcgtagaagaaaaccgcgttcgtcatcttgattatggtgtacagcttaaccagttgatgtataaacgcttaatgaatcgtgattacattacgctgtttagtccggatgttgctaacgatcgtctgtatgatctgttctatgaagctgatcagactgcatttgaagaactgtatgaaagcctggaaaaagatccaactgttcgtaagaaacgcatcaaagcggttgacctgttccaacttttagcacaggaacgcgcacagacaggacgcaaatacattttcaacactcatcacgtcaaccaacagggtagttttacggttcctgttcgtatgtctaacctgtgttgtgagattgcgatcccaacgtcgccgctggatgacgatgataaaatggctggtgaaatcggattgtgtacgctaatggctatcgttctggataacgctgatatcagcgaattcccgaaactcacgcgtattgcagtacgtgcgcttgataacctgttggattaccagaactaccctgtaaaagccgctctgaaagctaaacagcgccgttctctgggtgttggtatcaccaactatgcatcatggttagcgagcaactattgcgactactcagaagcgtatacagacaaagttcatgagctaatggaagcgtttcagtttaaccttctcgttgcttctatggaactggcgaaagaacgtggtgcatgtggattgtacaacgataccaaatacgctcgcgggttactgcctatcgattggtattgcaaaaccgttgatgaactggtagcacctgtttataattgcgattgggaatggttacgtagccagattaagaaatacggcttgcgcaactctactctttctgctttaatgccttgtgaaagtagttcacaggttagtaactctaccaacgggatcgaacctccgcgcggtttagtgagtatcaaatcttcgaaagaaggacactataaccaggttgtgcctaaccagaataaccagattgatttctatgatctgctctgggatatggctaaacgcggtaacaaagggtatctgtctcatgtagcagttatgcagaagtttgtcgatcagtctatttctgcaaacaccaactatgacccggcaaactatgaagacgggaaagttaaaacagaagacatcattgatgatctgctgtatgctaactactacggtgttaaaactctgtactatcataatacgcgtgatggtgctggtgatgaagaagaagccgcagaagattgcgcgggttgtaagatttgattaatgccccttcgggggctttttaaaggtaaagacatgttaacagtaatgaatacaaacccagatcataaccacttagaacaacctatgttttttggtgaagatactggtgttgcacgttatgaatcgcagaaacacaaagttttcgaaagcctgacgcaaaaacagctttctttcttctggcgtccggaagaagtcgatctgtctactgaccgtatgcagtatgcaaaacttcctgaacatgaaaaaatcattttcgattctaacctacagtatcaaaccctgttagataccattcagggacgtgggcctaacctcgcatttttgccaattgcatccgatgtgagcatggaaacctggatcgaaacgtgggcgtttagtgaaaccatccacagccgtagttacacgcatattcaacgtaacttgcacattgatccttctgtacagttcgaccaaatccttcgcaatgaagcgattatgaaacgttccgcatcaatgacacggtattatgatactctaattgatgaatgtcataagctgaaaaccatcatgatgctacaggaacaggttagcggctataaaccaaatgatccggctgtcgtgtattataacgagcaatacactaaacaggccactaagtgcaaagaagcgctgtacctttgtatgcacgctgtgaacgctctggaagcgatccgtttctatgtgtcgtttagtttcacctttaactttgccgaacaaggcaagatggaaggcaacgcgaaaattatgcgcttgattgcgcgtgatgaagcattgcatcagaaaggtactcagagtaaaatccgtttgtggcaaatgggtaaagatgatccagaaatggttgaaatctcccgtaggctgaaaaaagaagcaacggctatcttcctggaagtatatgaacaggaaaaagaatgggctgaacatttattctctgttggtgatgtagaaggtgtatcgctgaaaagcactatcgcttatattgaacaccttacagatcagcgtatgcgagcggtagggcttgattctccattcaccccgatccctaacccgtatccgtggatgaataaatggctcaaaagtgataacgtacaggttgccccgcaagaggttgaagtaagttcttacctcgtcggaaacttgaatactgaaatcagtgatgaagcgtatgcaaaatgggccagcaaatacgcgtgattgtcgggtagtaaacaagtacaaaactgattgggatgtcgatattcaaagaggtacgaagttcggcaacccttatcacacaggaaccaggggagaaaacattttagcgtttatcccctggttccagaatcaggttcgtactggggcgatcacgattgaagaattgaaagaacttgatggaaagaggcttggttgtacctgtgcgcctcttccctgtcacggtgattacatcgcgcatgtggttaatgttttgtgtggtaagaaaagatcacttgactttttggatatataatgtatgaaatctgaattcaacttaacccttgataaatgtggtcgcatcgatcgaagttttgttaagtgtggtgaacttaggcattgtgtttattttattgcaattaacgatgaaatagtatatgttggtaagtgtagggatatgtggaagcgtttagacacatatcgcaatgcaaagtattggagagaagccaaccccagtaacatcttaaaaacgtgtcgattggaaatggctatcaaaaaacgaaaaactgtgaaacttatcgtgactactcacgatgaaaatacatatcatgattatgaaatcaacatgatacgaaaatacaaccctgaatggaataaacagcactatgacaaaggcacaaactaaaattatcaataccctttacaaacaactcatgcagttgtgtggtgaatccgaaacatttttcttcgttgatcaagtaaccgtgatgggtacacctgttcgaatctttaactatcgcatggcctcatatacagactggctaaagcctggtgctctggaatgtcgcggtatcatgtttgaaatggatggagatacccccgtatcaatcatcagccgccctatggagaagttttttaactatgccgaggtaaaggcatgggaagcgcttaacgagtctcctattgaattaggcgaagttttagacgtgatgattaaagaagatggttccttgatctcaactttccttgacggtggatttctggcggtcaagtctaaaggttcggttaaatcagaacaagctatggatgcgcacagcgtgttaatggcaaatcgtgaattgctgacccgcttaactgagatcgctaaagaaaactatacggtgaacatggaatacgtttccccgaaaaaccgtattgtcgttggttatgattctcctgatctgcgtatcctgaacgttcgtcacaacatcacgggtgaatacatcccttatgatgaactctttgctgacgcgctgttacgtgcgtatctggttaagcgtgagaatatcgaagtactggatctggatgcattcgcaaaagaagcatatcagaatgaaggattcgaaggctatgttgttctgacaacgaaaggttttgtaaaaatcaaaacaaactggtatgtcaatctgcatcgcacaaaagatagcattaccaacaataaggatcttttcctaaatattgttgagaatacggtcgatgacctgaaacagctattcagttcggatctggtctctctgaaaaagattgacgatttcgaaaaacttttccttgatagtctcaatcgtttgagtgcaaaagcgttcaaagccattgaagataataaagggaaatcgcgtaaagattttgctatcagtctaagcgcggatttgtcaaacgacggtcggatcatcttcgggcctcttatgaagtatttcgaagaaaccgatccacaaaaactggttgatcgcatcattgatatgatggttaaaaattacgaccagttcattcctgaacaatataaatgaggttcataatgcctaagatatcatcttgggtatggcctgtaatcgtggggctatctttgatagcccttttttacattgcagtcgataccaaaatcgaaaacgcatcgttacgcaaggatatcaaatcgttgcaagacgatgtgaagaaagtaaaagagacaaatacaagcaatactgttatctacgtggaacaaaaatccaaagatcagcagttagtcaaggatgcagggcgcaaacaccttttgtttgagaaacctggattgattgaaatcaaaatcaacaaatccttcgacgaatacatgcaggaatttgaaaaatgaaattagcaatgatagtattacttggtgtttttctcgttggttgtgctgaacagccacctgttaaggtacttcctacgctacccgcaaaggttaacccagtgaaggtaaaatggaaagtaattgcagacgttagagaaatcgacgggaaacaataccttgtaatgccatatgatggtaatccttatgttgcattgacatatccagattcattgattttacgtagctggatgaatgacgttaaaagacaaaaggatcaaaccgataatgttctgtgtacgttgggataccctgagaaatgcaaatcaaaataaccaaaacgttttttcgtgacataacagaaggaaaagtttatactgcgaaaaaggataaagaaggtctatggatagaaaacgattggaaccgtgatatgtggctcaatcttacgaatgagtataacaaagaactaattgaatatgagatagtgaaatgaatctgtttatgactattggtgttccgggtagtggaaaaactacctgggcgcatgagaaagcccgtgaattgggtaatactgttacgatctctcgcgatgatctgcgtagctctttgtataatgctggtaaaggtgctggcggatacaaatacaccaaagcgaaagaagaaatgattgcagaaatgcaggatcacgttgttatctccactctgaaagatggtaaaaacgtgatcatacacaacacgcatctgaaagaaagtgataaaaatcactggcgtgaaattgcattggaacacaaagcagattttcatatcgaatactttgatgtgtccattgttgaactgcttcgccgtaaccacaaacgcggctgtgatgcattacccgtttcgcgtgtttgggaaatgtttaaccagtatcgtaagatccgtgggttcgtaccagcaatggaaattgtcaatccccacaatcagaaatgcgtgatctttgatgttgacggtacgctaacaaaagtagggcaacgtagcccgtatgactttaccaaagtgatcaatgatccgccaaacatcccgatccagcaactgtttcacctgtacaaaaatgcagggtataagtgtgttgttgtgtctgggcgtgaaggtaatccgcaatgcgcacatgatacatgggttagcctgttgagttatggcgttgaaccggatgaaatttttatgcgtcaagaaggtgataccaggacggattttgaagtaaaagaagaaattttgtttgacaagattttagataagtattatcctgttattgcagtggacgatagagacactccggtcgggatgtggcgagcaaacgggattccgtgcttacaagtcgattatggtgatttctgattgacatataatgtgggtatgttaaagtacccacacaaaagaggattatattatgaacgttattcgtgaagataaacacatcatggttgaacttggcgatcgcattcgcgtagaaaatctgggcgattttaaccaaaaagttcgtttgttgtgccaaaaaattgctaacaaaattcaggaacagggtaaagctccgggcgggtttgaagttagcgccactccggtttctcagtactcctatattgtgtatattcatgacgtggatactaacagcacccaatctttcgggctggtgttaaatcctattactggctacgttacatgggcggctgtattatgaaagtaaaagtaattgatagagcgatgatcacggatgaatctgtatacccagatcctcgttattatggcggtgttttcggatacatcaaaggaactgatattgatgtagtaacaagtccgatcgccgaatacgatatcaacaaagatcagacagaagttcgcgttactacaatcaacggttcagaatatatcgttgaagcgactcctgattttatcaaacagttactaaaggtgatgaaagatgcttgatcatcctggctctatgagcatggtgcttctggaagcattaaaagcatatgatattccttgtcatttcggtgaagtaactgttaatactatcattgacgaaatcgacaacccaaatactttcattgcttgtcttgttcgaaaattcacaagttgttttcgaccgagtccagaaaaagtagtaatcagttctgtttctgcacatcatcgagtgttagatgatggaaagattcaactttactggaaagttctttatcacatggtgtatcatgaagattgatgatattatgtttatgcttagagcaatcagtgcttctaagttctctcaatgtgtctctgttaatgtcggtgctgcattgagaaatggtaacgggcgtgtgtttgtaggcgcaaataatacggttgatcctagtcatcgttgtacagatcagtgcaatcacttattagatgataacgggaaactgagtgaagaaaagcgccctgaacattcacaatggtcagatcgcaacgaagtacacgcagaaatgcgcgttattatgctggcggcgtctcatgaacaaatcaaagacgcaactttgtatacaactcattccccttgctcacaatgtgcgaaaaatatcgaattttgtgttgcaacaggtatgattaagcgtgtagtatatctacataaatacgatcgtggtggcatcgagtggatatggcgtctacagcaatacggtgccgaagtagtacaacttgaccccgaagaaatgaataaacatttccggatcaaataacaaatgagtaaatgtatgtctgaactgagtgtaaaagcatcctttgaatatgttttgattgaaaccaacgctaaagcggctggaactgaaattgtatcaccttctggtattgtgactggtgttcgtcaacacggcgaggaaccgatctacggcacagtgttatcatgtgggccggatgtaccggaagaatataaaaccctgcttatgggtaagcgcgtaccgcttcctcatgcacaaatggcaaacgtgccggatcctgaactgattgcaggaaaggcaacaaaagaagaagctcgcaagtatccggttaaatatgtaaccgcacactataaagcgattcaagcaatttacgaataagagatccaacatggctaaacaaattcaagcaatcatcgccgataccgtcgcaaaatctaaaaaacttttcgacaaaggcgacatcctcgaagcaccgacccgcatcgatgtaatgacttcaatgatcattgatgctcaccagggaaaactaaattcccgtgcttcggaagtaatggaatacatcgtacagttcgaggatgtatgcaaatacgccaaagctgttgatccggctgttcgcgaaatctaccgcaaacagttctaaaaatatcggccccttagctcaataggtagagctaatcactcataatggttaggttcccggttcaagtcacgggaggggccaccaaacaaggcaaggcacttagagaagcgggaggaacagaatcagattctgttggttgtaggtgcaaatcctacccttgccaccaaattagggtgcgtagcgcaatgccgttaaatggttcggaatatgcaacctttctcacggagaaggctctgttggtatccggtaataggttccccggaatgcggggtgaagtaaagaaacttccagcccactaatttaatgaggtttatatgaaatttcgtgaaactgtgaaataccataatgcggtcgaacatacgcagatttttgttgatatgtctcctgcaaaattcaaagaacgctatggtatgacatttaatgaatggaaaaatggattacccgatggggattatcgaaaaaacttcaaattcagtgaatgttatgtagatgacgatccttacgatctggatatttttggtaaaacaacgcctctcattgagaattcgccagaacagctttacgaatcttgtattgactctgcatacgaaatttaaagagataacatgaaaaatttacaaaaactgtttgaaatgtctccggcaattagaaaaatcatcggagaaaatagcaatccaacgaatcgcaataaaaaattgatggaactttttgtaaaagagttcgatgattttgattctgaacttcataaagcgcttgaggcatattccaaacaagggttctttgcatcgccgcaagtaaatagcaagaaagagtatagcgaacgattctttgattgggagattgtcaatctcgttcgtagaacaaatatatctccgagcaatcaccaattgatttctcttgatacttcggtattctttatccagtatcttatcagtggtggtttcaaaaatcctgaaattccgtttacaaatgaagcggttagcagtgaatttgatgaatcatttgtatacatcaacacaaacaaataatcaaatggctatcttcggatagccttatttttggggtgtctatgcgctttttaaagtatgcaagttggatcgtactcgtccctcttgacattattactggagtattagcaattctgtttgccccgtttgttgtaccgttctacaacgagaaaacagggcatcttcctaaaggcttccggtggatggaaaccttcgataaccctattgatggtgatggtggacatatccgccgttgggcgtccatacgctatcatctgggggattttggggtgtacatgcaacgtgttggctggttgtggagaaacaaggcttataacttcgcatatcacgttttaggacgtgaagcgacaagcaaattcaactggaaaggcaacccaaaaacagaaggtgggccgaaccctgtaaatcatgggtatctgctcatgtggaacgaatcagcatggggtttgtacgtttacaaaccgtggctacggatccacaaagtgcaattctgtttgcgcgtttatgctggatggaaactgaaacaagaagttagcgacccagttaacctggatcgtgcaatgctggcgtttcatttcaacccgttcaggtattatgtaatcaagtaaaggtaatacaatgaaagcatttcaaattttagaaggtttgcatactggtacaatctatctggaagaaggtaacgacgttcggatcgtagtatcaaaaacattaactatggattctgtgatcggcaaagctcgcgttactccgtttgcaaagcgagagatcgagatcgaatatcagccaactgttaaagtggaaggtggacaacatctaaacgttaacgtgttgcgccgcgaaactctcctggatgctgttgaacatcctgaaaaatatccgcagttgacgatccgtgtatctggttatgcagtgcgttttaactcactgactcctgaacagcaacgcgatgttattgcccgtacttttacagagagtctataatggcaatttctgatattacgggttataaaccccatactgataaaaaagtagaaacagtaaaccgtatcaaagatgctgaaaatgcattaggtgcaatcctggaagatatcgaacagcgactatcaaattcagatattgattcactgatagaggaagaattagatgaggtgcttgaacgtatccatcaaattcaactagcgaaagaccgactgaaagaagcctctatgtgggcgtgtcgtgcggtgtttcagcctgacgaaaagtattaaaaatcaagccgttgccgaaaggtagcggcttttttcgtttttacataaaaagttgttgactcccttctcacattcccttatagttaatcccgtagacaagaaaacacttttatgaggatgacattatgaaacgctcttacaacatgaatgaactggttttcttcaaaactcgtcgtgaagcacgtgcttacgttctggcggctggtaaaaatacttctgctgctatcgatatgggtactgataaagctgttggtgctcgttgggccgctgttatcgttatcgctgctccggttactccggttaaaactctggtacttggtgcgcgtcacgccgaaactcttaacaccgctgcaagcggtaggggccacgaagttaaagtgttcaagaagcgttcttatctttcatgtgcaaggggttaactatggcacgattcatatataaagtggaatacgaaaatactgagttatctgatacctttttgaagatgattcgtgatcacgggcaacgtctggaaagagtaacgattgatactgcgtttgattgtcctgttgggttggttctaacattatcttgcagccccgcaaaagaatcagcccgtgttgaaatgttacataaactaaatgcattttatgaaggtggtagtgtatggcgagtattgtaaaatttttcaccgactcagtgaaagaaattaaaagcgctctggaacaatggaacactcgttgtgatgtatccattaaatcagagtacgaaacaacttatgatcgttatgatccggcccgtggtttgcacaataacccccatgaggtggaagtgtgaaatactacggattaaaaacgagtcattttggtaaagcgtatcgtacagaaaacatcgatcgcaaacttccgtactatgattctttagtactcgcgggacgcaaacgcgctcgccaggaagggaagaaagaaggtgaagatcgtgattagtttcggtaaaggaaccagaacaatacaagaagaaatttctggcataaacgagttacttcaatatatcgatgttgatacagaaactggtatttgtacatggaaaaaattgaagcctcgtatgaagaaatctttgttgggttccattgctggtactgtatccaaaaaagggtatactactatagaatataaccatcaaccatttttaagacaccgaatcgtgttttatgtatcgcatggatatctaccgttgattgtagaccatattcatggtgtttgtatgggtgacggggtttctaatttacaagaagcaacaaatcagcaaaatacacaaaaacaaaagaaatccaaaaacaatacgtctggttatcgtggggtatattggtgtaaagcatccgaaaagtggcaagcaagcatacgaatagatggtaaaaataatcatctgggattctatgatacaccagaagaagcacatgctgtatacgaaaataaagcaaaggaagtatacggaaatttttatgtagagcatacgttaagggaattattatgaatattggtagtggtgattcatacccatcatgcgctttaagcaactttgccccgcatccgtttacgttcgacggggtagaatgcgcatcgatggaggggcttttacaaagcctgaaatttagcaacccagatatgcaagcccatgtatgtactctggtaggcaaggccgcaaagttcaaaggcaaaaagaaaaaatggtggactaaccagaccttatactggaaaggtatccctattcatcgttcctctgaggcgtatcaaatcctgattgaaaacgcatataatgcgttattccttaatgaagggtttcgccgtgcgctggcagcaaccggaaaaagtaccttgacacattcaatgggaaagaataaaataaatgaaactgtactgactgaaagagagtttgtacgcaacttaacccgattgagagatctgttatgagtgaaaaagaaagagtagaatgcgtgttcctgttcaaaggcgcgattaatccattagcgttactgtatgcacaacatgcattacgttcaacgttgattcagagtgttatctataaagcaggtgtgtattatgttaccatcggcgcaaataacatggttgttattgaatcctatgttaaggaatgtgcatcaaacggcgttgtctttgataaagtcgattttgatgcaggggtagatgctgtttatatgtataagggttgatatgagttacgtagtttatttcgattgttcggatctcgatccgttcgtgcttcaacaggcaaagaaatatcatcaagatgtcgttggcattggtgtaacaaatgatgatatgttgtgcatcgaatttgaatattatcggacatttgagcgtgaacaattcctgggtgaattgaatgcattcaaaagtacccttttctttgatcgttatgaggttatatcttgacagaacttgatgaactcgttgacagtttacgaatagatttcgaaactggtaagtgtttctgggctaagaagataaccaaaaagactgttgttggagaagaagcgggttccgtccgtcccgatggttattgtagaatccggttcaaaggaaaatattactaccgtcatcgagtcatcttttatgcacggaataggtttcttcctgacgttgttgaccacataaaagaggttgacaatggtgacggtgtaggtaatattcaggcagcaactcaccaacagaatatgatgaaacaaaatatcaattcgttgaataaatctggttgccctggtgtatcatgggatacacaaagaaacaaatggctttccactattaaaaaggatggaaagaatatctatataggtcggtttgcgtcttatgatgacgcggttactgcccgaattaacaaagaaaaagaactatttggaaacttttataatgagcacaaacgcaaagcctgtaattctgactgatattgacgggatcgccgtaaaatggcagtcgggattgccgttctttttgtctaagcacaacatgcctactgatattgcattagaaatggttacagatgaaaaatttcgtgatatgactgaaatcttcggatgtgatcagcagttggctaaaatccttatggaagaatacaataacagttctttcattcgttatctgaatgcgtatgatgatgcattgattgtgatcaaccgtctgaaaacgcagtatgatttcgttgccgttaccgctctgggaacaacaccaacggcaagccttaaccgaattgctaacctgaatactcttttcccgtctgcgtttaaagaggtgatggtcgtgggccacggtgaaacaaaaactcatcgttacctggaagcaaaagcaaagtatggtaatcgtctggtttgctttgttgatgatctcgcgataaacttaaacgaatgtcataacgtcattagtcagttgccgttattccatatgttacgtggtgaacgtgaagaaacaaatgcacctcaccagttagtaaaatcgtggtttgaaattgaagagaaactaaatgatcttgtcaatccttaatgaacttgcgtctactctgaaaactaaagagaaagaagcaattttaaaacgtaatgcagataatgaattgttgaaagaagttttccgcattacgtatacaaaacagattatgttttatgtgcgtcaatttcctctggtagaagggaaaccaggcacaacaccgctttccgatgcaatcaaagcattactggaagatttagcaagccggaaatatacaggcaatgcagcgcgtgatcgtttactggatattgtatcatcagtgaacattaacgatcgtgaagtgctacgccgtatcattaaccgcgatctggaatgtggtgctggcacaaccttaccaaacagggtatggaagaaactcattcctgaacagcctcaatgcctcgctacgccgtttagtgaaaaggctttacgtcgcatcattttccctgcttactcgcagcttaaagccgatggtgcgcgttgcatggctgatttgctggaagcattaaaccgtaaggtatcgagagcgggtaacgagtacgaagggttaactcagcttgatatcgatctgaaaaagattcgcgattatctgggatatgatgtagttctggatggagaattgatttatgttccttccggaaccgtaccaacattacctgaacctgaaacagacatgcctttttctttatctgctttcatggacgatgatgataacgacattgcgttatttgcggaagaagttcgcaaagtatcgaccccagaagaagaacaggccgaagcaaaacgcgaagaagggaacgggatcgtaaacaaatctctgaaagggacgatcaccgaagaagaacagcgaaacattgtttatgttgtttgggatattattccatatgaggtgtattacggcgaagctgaaagtgttcagacttatgatgagcggtttagcctgttgcgtgatatcctcctggatctttctctgccttctgttcgtttgattcagtctaagctggttaataacattgcagaagcgaagcaggactataacaattaccgcaatgacggtaaagaaggttctattctcaaaaacagaaacttcaaatggaaagattcgcgagtagccgatcaggttaagctgaaaaacaaaaccccgattgaactacggatcattgatatctacgcgcacactaaagaagaccataaggtcggcgggtttgtggtggaagatttatccggaatggctcgaacgaataccggatctgggttaactgataccgattatcgttacgatgatgatggtattacccgtgtatacattccattagatgaacgtggtgaactggatcgcgaatacatcatggcgcataaagatgaatacattggggccattgtagaaatggaagttgacggcctccagaagtcgaaaacgcgtaagaaaggggaaccggaatacagtttcttccttcctattatcaagaagataagacgcgataagaccgaacccgacgatattcatgttgtctttgcagatctattttaataaaaagcccttgactccggtcgggggctttgttatattgggcctatcgaaacgtaaatcactaagagaatatattatgactagtagttatcagaaacacaaaacccttatggcaaacctgtccggtaaacatatcgacgaagtaaaatctctgctgacagtgaccgaaggttcccgattcgaaacaaatcacattatcaaaccttctgtgaagaaagtactgaaagtgatttaccgacatccggtgtatcagtgcgttcatatcatgaacagcaacgcatttattttcgtatataacgaatccgatgataagtgtgttggtattttccgaaaacctaactttgaatgcatgagcgaagcggctgttgcaaccccgatcgttgaagaatatccggattatgttcaacgcaacatgcgttatgtgcaatcccgacttgattatgcatacgatttcaattctgacgcggtagaagcgctggcggatatcctttgcaaaaaccagaaagatcgccaaatgacaaaatatctgacagatccaacaccgccaacaattcgaatttccgttgaagttccgtttgacaaccattttatggcagttgaagcgcttgctaaactcggtttagaagtgaaaacagaagccgtttaatagcactttttgttaaaaagcctcttgcaatgcagggggcttgtttggtatagtgtgttcatcgaaacgaaacagacaaaaggaacatcacatgaacttcatcgatatcaacaaagatttggaaggtaaaaacatcaaactcgttaaccgcgaaatgttagagagtcttggtaacggtggcgaaaaattcagtgaagaattctataacaatttatcattgatgacggtcaagcgcgttgatgttcagggtggttccggttgggtttctgcaattccggtttccctggtagatcaagcaacatatgacccagttgcggattcatgggatctggaaatgccgttggtattcgaagaagtcatgaagtgttacgaaatcgcataagggtattattatgaatagcggaaaattacaaatgaaagttagcgaagaagaagttaaagagcggttatcggtagcaagaagattccttgaatctatcgaccctgataaacttggaaaatgccctgatacgatttgccttaattgtgggcgttctgttcttgttggtaaatgctgcgataatccaaatatagttgtgatggaaaaggaacaagtatcccccgaaacatgggatcagatccaggaaatcattaaaaaccctccagcgccaactaagaaattacgtgaattgatgacaaggaaaatgaaatatgagcaaatttaaattgagtgcaaccgttcgccttattcgttggaatggtgaagagatccgttatgatgacccagaattcgcccatgaaattctttcgcatcgtttgggattgaaaaacgcgtcattggttcaaactgttaaaacatcagcagagccggaaatttggcgttgtgttattctggatctcgataacaacattgattatgatgatcctaagaactatccgcttctggaagcacaagttgagaatgctccagaagacagacagtgttttttggttgagttgccacgcgaacattacgaaaacatcataaaggcccgtaaaaaggtcaataacaatgttttcgatctccacctcggattgtttgaggattaagtactgctagttgtgttcgtagtagcggcgctggtaggttcccccacctgtatacattcaagtgtttgcaggtggaaatcttttgatacgtctcgaacacattcaacgatcagatattttcctgcatattcttccccaaatacctcaatgattgcccctaccttaacatctaaacgaccctgctttatatcgaatcggatccggcgttcatagctggataacaattgcattttagacgcctggaaaggtttaccttctgaatctgggttctgaaagttggtatcatagattgcattacggtttgtgaagatccatgtattctctgtgtctgtatcagccagtatatcaccgtacatctttttatcagtcaatgacagactaaagaaactggcgtctttaaacagcgttgtgttatccttatgggtaatgtactgggcttctgtgaatatgacagtatcgccaacaaacacgttatcaacgttaaatttgtatgctgggatcggtgtctgggccagaatgtcagttgaacttttaaggaaaataccggaaccatcttcccacagataacagaaatcagaagaaactacactttgcccgttgtccctgatataatcgaatatatcctgatatgtaccatttagacatccaggagggatacgtatgttaccgccgtcaacttcgggggtaagtagtttcattttgctatacagtgccgtcatacactctgtaatcgtctgtacggcgttattgctaaatgaacgggcaaacttacgtctgaacgttttatgcagcggagagaggttcatacgcagcacagagcggtttttatcgtcagtatctacgttagagtaaagcaatccgtaataatgttgttcctgtgtaccgttatactggaaagatacctgtatgatcggctggataagttgctgatagattaactgtgcgtcgtatatctgcatcagcgtttccgatgagccgttaatcatcgtcttttcactaaacgagacaagagcgggtagcaattcagtatatgcgttatcaatgtatttttcgtatgatgtatataatttaatcgatgtgactcgattgacgattttttcagccataaaaatccctcctaatatatcctatttactaaatagtaaataatgacccaggttcaatttgaggcaataatgaaaaataaaactcttgataaatttatgactacacggcttgaaatcaagaagactaacgttaaaaccgttcatcttccggatggaacagccattgagatccctaagatgtcgtatcgtcattttgtaaagattaagactctgaaagatgacccagttgcgatcatgcgattcatcattgatgacatcaaaccgcgtgaactaacagcagcggaaattgaatttgtgttgatccatatgtatgcacacaataacgctgattatgccaatacgcttaaagaaattgggctaaatcttgatgacctcaaaatctccgaaccttgctatgattttacgtttgacaatgtgcggttagtctttgacaaacccagcctgttaaatgctcaccttccgttcctcatcaaagaggcatatgttgacggtaagccagtagaattaactgaggataaacgagacgaattaattaattgcctgtaccgattcgaatatgatcaggtatcacgtggtgtcctccaggaagtatacattattcatgaggggaaaaccatcaaagggcttaacatcattggtgaatgataatggctaactcttatttcaacgaagaacaaaagaaaaagtttctgaacagaaacaacaacaaacaaccagcggtcaccaaagtaacagcctcccttgatgctgaaagcgcccgtgacctaaaggaaatcaacgataacacccttgaaagtgcaatcaatactcttgatatcaaagaagggttgaaatcgttcgaagaaaaattccgtgacaaattcgcggggttcaaagaacaatacgaagaggataaaaaggaatcattagccgaacaactacctgatttcgtcggcccgatccgtcctatatccttaaccgatgataactcaaaaactgttgacaatacagtaaacgttaaccaaaatggtcagttcggtaagctggaagaaaacaccgaatctatttttcatgctattaacaaacttgttgatttatatgaaaatactgataagcataagccgcttcctgaaccagtggaagaacccgatccgtatgtagacactaagaaaaaacgcatcaatgatgatgatgacaaaagaagcaaaactctggatagtattgctaaaagtctggtttctattaaaggttttacatcgcagatccttagccgtttcattggttactctctggaagcaatggcaaagtttgctaaatggacgctccttattggttcgttaatctttacattcgatgtgttgcgcgtcacaatacgcaaatggttcgaagatatcctgaaagaaggggaatcctcaaagaaactatttggtacatatctgggtaacgtaaaggctatcgtaacaaagatcgaagaaggtttgaacaacttcaatatgaacaacttaggcgaatcacttcgtgatttgttcgttgagcctatgaagttgttggggcaaactgtacaaacggcaatcactgagggtatcggtcgtcttattcaatcattgggtgaatcaactggtatagacagcattaccaatgccggacgcggaatgcagatcaccgctttacgtgataaacagaaatttggtcttgaattgactaaagaagatattcttatgatcaagaaacaggaactagaagaccaaaaagcggcattagaaaaagaagataaagctattgcagcacgtcatgcattaacaataactccttctcaaattcctaatggttctatctataaagttgctcctactgattatcaagaaagaaatcagaaaaccgtagatgctgataaagaacggcttgataatatgaagaaagcaacggaagaaatgcagaaacaatacgatttagctaaaagcagcgaagaggaagcacaaaaattagccgatgaggaaaacaaacgcaaccgcgcacgtatagaagaagcaaaaaggttagaacaagcgaggaaggaaggaaaacagccgccagaaggtgaagagaaaaagggtgatgatctgttgggtaaagcaaccaactatgctaactctgaaaatctggatgcagccgatatcaaatacattaacgatgaactgttggatcagcttgaaaaacgtcgtaatgaaggtaatctggacgatgtacagaaggatagaatctctgaccttatcgagcaattgcaaaacaagattgcagcccgtacagaatccagcaccccgatcgacgcacagccaccgttagcagcaaataaaccggatgctgataaagcaagcaacattcaggttaacaacaaaactgttaacaacaacgtaactcattcagtacaacgcacagagcataaaccgctcgtagcgctggcataaggaacatataatgaagttttctattattgatgacagtataaacactctcaaaaatattaaaaatcgcggtatcccctctgggggtgccgcaatcacagaatcagtattaaagcaaactatcgttaccgccgaatttccggcccaacgtgcagcaggtatcgataacgcttataatgcttcgagtctgtataataacggccttctgttcactgcatatgattttaatggtgttggtagtaaagacaactatcgttcattacgtcaggcagcacagaacccaaaacaaatactatcatctgcgacgggtaatgttaagtacaaacaagtgttgaatagttctattggtactatggaacctgtttgccagatcctgctaccgcgaagcctgaacgataacgaagtaaacagccaccgctatcaagatgcaaacgatagtttcttaaccaaagggttgagccgtgttgtttcaaacatggtatggggcgctgtagaatccatttcaggcggtattatggcagaccgaagagaagcccttgatgttggtactaaagccgctttccagggttctgacaagcgaacaaagatgtattacaatacattcgtgatcgaaagccgtaatgatttgctggaactgattaaaatctactatctgtttactgttctgggatatggtacaacttctggcggtactgctaaagaggttgctgcattggttaaacagtattacggtgttctgggtgctaaaaccgctaacgcaattagcccttccagtaacccagtaacagcgtcagattttgataatagtctgggtaatgacgtggttgatttcatttcaaacgtagaggttattaaatcgcctcctgtctggtttattcgtgatttccagtctggggattccttgcgtttacctcattcaacctttgggccagcaggtattaccagtgttcgctttggtcgttctattgataatattgtaaatacattaagagaatcaccaaataccccgatctcacttgaggtcgaaattcaatttatggaactgatcgatatgcgtcaggattctatttttgatacaaattactaaggagatatgatgttttacaacgtagatgaatttttatcaggtatggctaatcgcgattttcagcgtagcaacctgtttagcgttgtatttgcaaccagccctgcatcacgtatccttgacaacacgatcggtagtattcgagatactttgattgatggatctattagttctatcaacgcaaacaacccgaacgaattcattaatgctatcactggcggtgtgagtaaattgtttagttacaccgtcgataaggcgattatgtcgctgaacaaaacaggatttagcaaaatcatcggggcaattagcccccgtttgattacttccctgtttggtgatagcatgtatggacaactgctatctgaattccgtgatgaaatgatgtataatatgggtttaagcattatgggagttaacctccctggtaaatccattgggtacgaatacgtttataatggtggcgtacctcaaatcagattcactcgccctgagaatggggaattgtcattgacgttccgcaccgattcagaagcccgtaacctgaaaatctttaacgaatggatttccgctattcgcgatgatgtaacaggacaatacgccttcattgatgaagtgacaagtactattcaggttaacttacacgatcgtgatggttcaccgcatacaacatacgtatttcagaagtgcttgcccgtcaaaatcagtaacagtgaattgagctatgagaacaacaacgaaatctggacatttactgttgattttgcctataaaacatcatgggttgttgaggctgataaagaaggctgggaagggttcaaacaatccgtagaggaaggtttagccattgcagcacgtaccgcaattacaggacaataaaggggctacggccccttttgaggatcttatgtttgatattattcgagtaacattaccatcagggatcaaacgattccctatgtttacagttaaagaccagtttaaactaatgctgacccgtattgatatggaaggtcggccccttaaagagcaacaggaaatactggatgaagtgctggatctgctttatcctgggtattccaaaacagaacaggaatatattttcagccgggtgtattgtggttcgtttggtaaaaacgttatcaaggttgtgataggcggtaaaggcgggggccactccgaagccttcatggtgattaatgatattcaactagaaaatgaatacaagctgaatgatgaaatcacattagggtttaacttcccccgtacacgcaatacaagtgaagagttgtttcttgaatgtatcagttatgtaatatacaacgaacagcgctatgaatggacatcactaaccgaagaaacgaaagagaatattcttgatatagtcgaacttgatgatgtcgaaaaaatagttactatgctaacgaaatcggttgatgtgtctatgcgcggtaaatcatttagtggtatgttaaccctgttcaagatcctgtttagtcgcggggatctggatgaatttgtgaagaccaactatctgctaaataaaaacggcctgaacctggaacctatcatgaatagtagcccaatggaaaggcaaatttatactgcattgcttgcagaagacttgaaaaaacaaggtgctgttaaatgagaaagcatgaatataaacacgttgagaaatataatgttgattatcgtcctctgacacatacagagtttacccccaatgcagattttatcaaaggggatgtttacctgtatcaaagagaatatcttttcattctggcacttctggaaagtaaaaatattgatacccgtcaactgttcatcaactgtgaagaatgtcaggaaagaattgaattccagcttaaacgcaatcaaataatggttgaagatttcgacgataagctatacggcaatgacgggatcgcgttatctgttcaccctcgtaagactggtgatgaagaaatccccgatcttatcgattacgtaatgatagacggcgaacagatcatgtggagtgattgcagcgacaaagataaagaaatggtgttggatgcaatcgactatgcaacctataaatcgatttctaccgccctggataagccagcagtggtcgcaaacattccggaaggtgttcgtgtggacatagccatatcgtctctctgagaggcttacagcaatttttaaaggtggtctaaatgggtgtaaatctgaggttgttatatagcgatatagaacctaacatgcaacgagattggaataatgacgtatcggcctcaaaaggggccgcagcagtgagaaatagtttgattggtatcgtaaccacgatcaagggtacacgtccatttgatagtaactttggttgtgctattagtgatatgctgtttgagaacatgaaccctctgacagcggaatcaattagaacttctatcgtatctgcgatccggacatatgagcctagagtatataatctttctgttgaagttattccacagtatgatgataactcagtaacagtaaccatctattacagcatcattgatgacccggatgacgtagagcaaatcaaactacagctttccgcatcataacaaaaagccccttcctttcggttggggctttctcttagaattcaatgaatcccattagtgtttgatatcgcaattcaaacggggagatataactttgcatctggttttgatcggatacgatgtaataatacacctcatcattatcatcgtatagtgcttctttgatgatgcaatatcgatcggtttccacgttcacataaagagtatccatgtactttgtaactttggaaccctgtgaactgatctcgtgaatagcgttatctatgaacagtgacaatgcttgcatgaagttatcaaactcaccatattcacagcccataatagaaattgcagtgtattggtgccagcctttgattgtatctccacggcggatccatccgatttgtctacccccgatagatacacaccacactttaccaatagggctatagaaccgcacaacttcttttaataacagggacatgaccccgcattttgtataaggattcattttaacctcatttcatatcaagtagccatgaagggttagtttcaagagaaatcgcagtatattcgtattttacagtataacctttgaaaccgaaaggaataattgcattttcattgagatattttactttatgctttgcttcttcttcattcagagcagcacagactgttgtttgttcaacgttaccagcaggagaagtaaatttttcaatgatgatatatacgcagttcatcctattgtcctctttccattttttcaagtttcatcgtatccacttgcagttgaagtttaagaatacaacctttcgatatgttatacaagtagtcactaacgatttttgactttacctgatcgtaatcagaagataacgtaatccaatcatacatcgtttggtatgatggaagatacgtacattgttcttcttttgataacgctttaaatgattggtaatcggttggaggttccgaagcaattgcggttgtggtcataagactaagtgcaagtagtagatatttcataatgtattcctcattgttttcgatagaaccaatatagcaaaaagccccgaccgaagtcaagggctttttcatcaatgcaagaaagatttcacgtactgttcgatcttttcacgacatgtatcaactgaggtgctttccgcaattacggcatgacataacgcctcgcctccgacccagaaactcatcatgtactgaatatcacgaccttccatttctttttgatgcgctttgattcgatcgaaagcgttttcgattgtttcagtagcagtaagcatttcggattccccgtcaacctccgccagttccccatcgatcatttcgctttcgacttcttcccagtatactatcgttatcatgcattaccccagtggttaaccgtcgtaatccccgccacaattcacatcgccttcaatgaacagttcgcggttatcacgtaataaattatactttctttcgagttcaggcccgaacgcgtcggcgtcttcataccagctataattgtatcttccgcattcatcatcatattctggttcatcgccgcgttcattgaagtgaacgattttgatatcgtccatccccagttctttcagcttatcccagatatacgaaatctcaacgctatgggaaccgaacgcttccagtgagatcgtaccgtcgctatcgacttgaggaacaccccacttcgaacgagtatcatcggtgatcatatctattaatgactcaatattattctcaccgtagatatcagcaacttccttttctttaccagggcgaacaagtccgatcccgataataaagctactgcttgagctattgctcacaaacccagaacgaattttcatcgcatcaccatattaccaatcatgaatagagggattagcgcgaagacgataccccatagaatgaccttatcttcacgacggtcacacccataatagataacacctccagcgaaaatcaatacaacaactgaaacgaacgcgaataaataaatcatttgcaggtatccattctcatagaaacttctttcaggatcttattcagatcgtgaagcgcatcttttacgttaccttcgttataggtaagcatatcctggtacagccctttcaagcaacgattgattacatatgctttttcagaaggtaacattgtaccagagcgattataatctctgaaaatgtccatcatcgtgccgttgttaccaggtaatgacgggttgaagttaaccataccggacatcaaactatcaacatacacaactgttgtgttatcagaacgatacgcgccaccaactttaaaccagttgctgaacacatacggagattcccgcacttcgctcaaatcggttccgatttcatcgatgtttacacgaatgttgttaaaatacaccgattcatcaatagaaccatgacgccataagatagcaccattgttatttttgaatccgactacatcaacctgccagccgttatctgttaaccggacatcatcaacgacgatgaaatcaggtagctgtgaatgaaagccgatgttttcaggacgggaattacgaaacccatcacgattggagaaataaaggatgtcgccttgattcagttcgcatatattcataagatttttaaagtccaattcaagtaattccacaagtcacctcaaagccccctttcgggggcgagatctcattagagtttaacttctttttcttccagaacgattgtgcaatcaaatttcacatctttccagaattccgctgcaacgatatctgttgcggtaacgcttacgctggtttcttcgaaatccagatccgcaaaccatgcgtgtccgacgacaataccgtacattacacgactcaggcgattattaagggcgcgaacctctttaatagtttcctttgtctgcttatcaagatactcgatcaggtcattcttgtcaagcgcttcgatctctttagatacagtatcataagcccacagaatgatcaggtcgccattgttgagtttcttcttaccttcggcgcgttttgcaacggtagcagcaacagccggaagtgatgaaacgcctttgattttcacgttcagttctttcgacatgtaaacatcagtcgattctgtgcgctcaaccttcggagaaaagccgtaatcacggatcccttgctcagacaaccattcaccagccgcctcaccaaagcgctgtttaagcccttctgcgttgcgtaaaccaatcgcgttatcacggaagaacttcattaccttctgacggcctttcaggatttccagacggacgttatcagcaacaaattccttaccagaaataccgcgagtcatcgaacggttaaccagaggcagagaggtaaagtcaaccagtacagacatacggtcttcaccaattttagccagcggtttgatagtcagaccagaagcacgtaagtttttcagagtcgggatatcggtttccagcggaagtaccttaacgttaacgataccatctttaacaatggtaaagttacgcacttgtttggtttctactttttccggcaatccaaactctttttgtttgctttccggaatggttacgtaaccttgtagatccgtattgatagaaatgttcggacgggaactgttacccaccaggtgtttcactgcaactttcgttgtggtttgggtaaattccggtttccatacttcatgcgctaccagttgcgccgccagtgctttacgttcttccggagtagaagcgtttgcaatctgttctgacagtttatccagtgtatcatcatctttctggacagtctgacggcctgtacgattgtacgcccagtgttcagaagacaggtcgatcactgtgtcggtttctgccagcagttcgagagcatcaaccagagtaaacgcgttttcatcaggaaccatgttgtaatcaacaccatccatcagacgtttagccggatcaacaaccgcttctgagatcatatctttagcgttggaataatcctgtttggtaaagcagttatcgtatgctttaatcagacgcacatcacccagctttttcagaactttccatgccagatctggattcatggtatgaagcgcatgatacagaaccacatacagaacctgttcaccttctgctgttgccggatcgaagccgtcaacgtcattgatcgcgttttcacccagcgcccaaatgtttttgatatgttccggaaccagaacaacaccatttgcagcattcaggacatacacacggccttcatccaggtagattgcatgggttgcatcgccaactttgacttcaacacgtgcggaggtttgcgcggtaatgatttcatcaaatgcaggtacatacgcatcaaacccttcaacgaatttgtgtaatgcgttggttgcttccgccattttttccagcagaggacggtttacataataaccatattccaggaaagcaatgttgttaaacgtcaacggcagagtagaacacgctttcaggatatcatcagtacgccagcagttatcataaccatcagtcaggaagatcagactgttcagattgccattatccgcttgcagatcggtagcgacttcaaccgccagttgcagaggttcaacgaagccagtacatccggtcggacgcagataacgatcgatagcatcattgattttgctcaggtcggatacagagctaaccttttcgccaacgaatacagaaccgaactgaccacggctggagaaatacagaatagatacagtatcatcctgcttaaccagcgttgccaggttgtttttcaggtgctgacgaatgcgcgggagttcgttatacatcgatccggatacgtcacaaacaaaaacgtggttagtcggggttggtttggctacggcgtttttgaattcaatgttagtgatcataattttctcatttataggtaaatttgattaaaatttcgtttacttttttgctaataatatctaatgcatcatcgcatccaaacttactactcaacaatgaaacaaaatcatccatcgttgttgtttgagactcaccaacgtcaaaagacagagcgtaggcaacaggatttttaatccttacgatttgaatagtatactcattcagatcaaaccgttcaagatattttcgcaaagaaaataaatcaatcggtactggtagagtttgactaaacgttatttcttcccccagttgataggggggcatttttacacagatttcgtattccatcagtggtgactcttcatagtgtgttccagattacggaaaatttgcccgtgttcaagctgggattgaaattctccgcattcatcagagtaagtaaattcataaatgaatacaccgttctgattgccaaatttagcgttgtactcttcatacagccacatcttgatcagagcgtctttctcttctgtttccagatcataccagtcacgcccatcataagcaagcgcaatttgaggattagaccgatatcgagtttcggcgctatcttcggtttcccattcataacgcttataatcatagtatgattcgaagctatttcccatatgaccgcccaggtcgcggtgtacctgctgtacaacttcttccgctgtcgggcaagtcatccagctataaccacagttaggaacacaatcacccatcatttcccggagattgttgatatcagtcggatccttcgggaaccgtacaataaagctacttgatgaactattgctcacaaaaccagaacggattttcattataatttctcccactcaaacgttgtgaaatgttttctttcgtcatacccaacagtacaacaatgtgttggctttcctgtgaatccatcaaacacagttatacaatagtaatgcaaagatggaagcggtgtatgcttaatgtagttgatcgcgacgttcaggtcaacagtagaacatacacaatcagacgtttgatcaaaacggccatcaaaaatcaactcaatgctatagatgttcatctttcacttccttcatgtttttcataacctcttcaaaagttacggggatttcgttgtactgtagtgattcatcatcccatacatcgcgatgcccgaatgttgaactttttgcaatgagtttttcattttcccatacatcaatagtaacatgatcaccaagataagggaaattaggaactttgttcagcgcatcaacgcagttttgcaatgattcagaaacatgggcaatttcagtgaattcataatcagcactataagaagctacgtaaatcatcaccaccccctaacgatgctaaccagcagtaaacccagaatccagaacacagcaaccgcacaaatacgggccattactacatttccgcgactagtccactccgcactaaggaacaagagaacaaacgttaacgcgtataaaaccatttcaataacttcggtaatcatataaacctcactgaacataacgattgtagttgatgtgccacatgagactagacacaacatcggaaacaatcaaaaggaacaaaccagcaatcattatcaaaaggataactaaccaagtggttccgatattttgttttaacgacaatagcaaacacataatactgacaaaagcaaggaaagaaataacaagcatcacgattgaaggggccataatataaacctcacgaaaaagccccaaaaggggcttgattaatcaatgtccgaacacaccacgaatagactctgcgaatgcatacagttcaggatttttagcttttactgtttcgatttgctccagaatgtaatctggcttgtatttcgcaccgaaccagcagtaagagaaagagcgatcccacatgaacacgttatagtattcaccgttacgaacttcaaccatcacataaccaggattagaacccagcggataatctttcagaagattgaatttcgcgccagcaccagtacatccgttaaacaggtcattaaaagtcatggtatgttccttttgtcagtttcgtttcaacaaggtcactatactattcttcgttagcctatgcaagatttaatttagcaaattctccaaaatgttttatcgcttcctggtcgtatgcttttgcagcctctaactcatcactataagaaccgatatgcttaaccttaccatcaaccattatctgtgcaatgtaacgtattccggttggttgattgcgtacacatacacccttgaatatgctggttccttcctttcgccgtttcctgttctgagagttgcgggattggttcgcttcgcgcaagttatcaatcccgtcaccagcctcaacaccatttttgtgatcaatcacatcaggtagttttccggtcgcaacgtagtagatgattcgatggcgtagataccctttgcttttgaaataaacgcgtgtatatcctcctttgatcttcgaaccaacttcctttccgatcaagtcggaacgtttatgcgatgttcgtataatctttcctgtgtggacatcaacagaaacagttttgaggaattcatcaattcctctctgttcttcttcaactgttcttaatccattatgtgacataacgccttcttaatttgttttgctatggcttcaatcactgggatggaaactgaattcccagcctgtttgtaagcctgtattttgctttcagggatgataaacgaatccggaaacccttgtaacctaaaacattctcgcgggcttaatcttctagggttcttaccttcctgtaataccagacattgaacaccgtcctttccatattgggctgttatcgtcccagtacacacagaatcaactgtaacggcctgatagccaaaccccttgccgtttgccttgtttcgttctttacgctctctaaagcccttccaggcacgatctgatatggtgtattgatcattatccggttcgagaatgtcaccgacccttgttggggtacgtggaggaacaggaaaactaaagaacactggatcgcgaaagcagacaataaacacacgctctcttcgttgaggcaatccaaaatcttttgtattcattacctgataatggatatcgtatccttcgtcctgtaacagcctgtagatggttttaaacgtgtttcccttgtcatgggttaatagctggggaacattctcaaagaacagcacagagggctttttagcccgtataatgcggagtatttcaaagatgatagtaccgcgaggatctaacatgccctgttttaaacctgctttactgaacgcctgacaaggaaacccagctaacaggatatcatgatcaggcacatcattttcatcaatggcgaatatatcaccctgaatattttcatcgccccagttatcagcatatgtttgttgtgcatgtttatcgatttcagacgttaaaaggcattcgaccccgccgaatgccttatcgaaaccgagcctcacgccaccaacaccagcgcaaaggtcaattattttcatacgtcgaaatcaacctcatcgattttgtatgattcttcgccaatatcagcccatagctgaatattcacgcttttcgcatcacgataaagagattgaccacaaagcccacctgtataacaagtttctgtaatctcgttaacttccaggcggaggctattgcgcataattttaacaacagccttttccattgcagaatccagggttttagtatcacccaatactacatctttaacgttcaaaataacatcactcattatcgccactccgtttcaattccgtgtttgtatgcgtcaacgcccagaggggtgatcactaaacacatatcagtatttttcgttggcgaactaaacgccattgatgcgtaacctttttgaatcagggaatcacgccctgatttactgggaacatcgttgaaatccaaatccaacatttttgacgagtatccgtaaagtttacacagaacatcaatttcagcgccagataatttcggatatgtcatttatagtacctcacaacatgttcagaatacacacgttcaatgaaatcattccagaaatcgcgatcaacttctttcggataaccagatacagccgccagcttttcaacttcacacatcgttgattctagcgcctcttgtacggttgcgaaaggaacaccgccagctttaaccattttcaaaaatgcgctatccggaagaggatacacaatatcaccttctttgaaaatctggatcaattgcataccaccgcgcaatgcatgagaaagagctttccagtcgatcccgttgttggcttctgcttgccgtgcgcgttccccgtattcatcccagagtttatacacggatttcttcatttccgctacggtgattgtagactggaatttacgccccagaacttcataaaattcctgacaacctgatttcagtgttttgtctgtaacgaatcgacaaaactcgttggtcgggaatcggttagaaacctcaccaactttgatgcgcttgccgtagttagattcatctacgttacccagcaatgatgtgccataccagtaatcaggaatcatctgcaacacatcgacaacttcacgtaatgcagccaggcgagaacctttaacgccatacttcgccgcttgcttacgaacataaccaaacaggccagttagttccgtagtgtagaagcgtgaacggttagcgcggagatattgccagatatcagagttagcgatcagtttgctatcatctgcatgaagcatatcaatcgccacggtgtcaccatcacatgcgaggctgataaacttttgcagactgtaaatctgacggtctacgtcattaacaccgttctttgagtttttatcgccagttgatgtatcaatagacttcttcgcagtacctaacaggatttcgcgaggatgagggagatagatccctttgtagtctttatcgcttgtcggtgtgttcagtccgtacaggtgagaaccaaataccatctcaacaattgttttcattatacaaatctccaataaaaccctttatgagtttttcttttaccgttacaacatgaacttacatgccctttgttataccccatttcaacggcttccgcaataccaccatttaaaatagtttctctttctgttttgatacatttcataatcaaaggttttatcaattctgttttcttttgtgaaatattagctaatgcaattgcatttctgatatcagattcactcattaaatcagaaatcttctttcttaaccatacatagccttgacttttggcaagtttaccggaacaacattcatgaatatgactagggttaaatccacgcaatttcatttcttgctgaccacctaatataataatcttgtctcctgtttcaaggttgaacccgacaaccggaattatttgcctttccgacattttctttctcgcttctttcgtgaatgttgtaagagattttaattttctcgcgtcactcatttgtgaagatgtcgttttgtatttcttagtattatgagacatacggaaaaaagcatatctcattttatcaccagcatacttagcaagtagatgatgagcaagataatgttctttatatgtcaaatatactaaattttcgggttcatctgtgccacctaatgacttagcaacgatatggtgtatatcataaccgtgctttctatactttttcgagtaacctttaggtatatctcttctttttgccagtgtaattagttggtcgtaaatacgcttatagttcatacattctcctttatgcgtatttatcactcaaaatccgaatatggtttccattacagttttcaaaattcaacctttaatgtttttgcgatcccgcgcaattcagcggtagtaataacagggatcataatcatttcctcacagtttcaaattcttcatcagatttccaatatacgttaaaattacgacaatcgtgttcggatgtcaacgtgtatttttcatttgttttttcgtcagtgataaccatagtttcattctcgatcgagttaacaccgtaaacgaaaacattctcaccacgtttgtttaaaaacgcatcacccttttcaatcaactgccaacaggtaacaggcaaaccacccggactaaccgggcgggtaacaagacaatagggatgtttaatcatttaaattcttccattgcataggaagtaagatctttgaaataccttgcggtgttgccttctgggttgtttgtaatctccatcaggataacagcactatcaactcctgctttcttagccatgaatgaaagggcttcggtagcaataatcgttgctttcataacatcagctttagaaacgttgattgtattcattttttcttccttttcattaatcacttggtatgtgtataatacaaaagccctcacgagaacgcaagggctttttattaaatttcgtataaatctggattcacaataaccgcacataaaagatcatctatatgtgcggcttcttgttctaaggtttgcttagatgaatgtgctttcaagcaacccccgtaaaggcgtttactatctggaaatgatcatcaaagaattccccttgtcgttgcacgacctcatgcatcggtagccagaacgcgtctgctgcatcatcagagccgcccatgatacgaggcaatgaaccatcgttattaggttcgagcttgatatactgtgctacagtcggttttgagaagtacaccgaacgtttcggatgatcgaacagcatcgaattacggatagaaccacgaataaccttttcaggtactttaattcgtacttcttccagtaattcacggatcgcacaatcaaggaacgtttcgttaccgtttttgtgtccacccggaagcgctaacgcatctttaccaggcgcaaacttacgacggattactaacacgtggttattacatacgaccactgaatcagccgtgcaacagttcagagaatccggatacggatattttttgaacttgtcaatctctcgttgccagtgcgcatcttcatgggacaaacgctggaattcttttgtttgtgtccattcatcgataaaggaaaccgtagtgctaggcgcatattttaacaaatcttcgtcccagccttcatggtgttcccagataattttgcgtaaattggtcgaggacagatcctggtctccaaccttcacagattcaaccggaatatgattccatccgaatgctttaagccagtaagaatctttgtctttttcgtacccgacgatcgcaattcggtcatttcgagtttcatcgattgccatacgaacacgggatttccatttttcctcgttatagagataatccggaatgtgagcgaatttgattctggctgcatcttcaacatcaagtttgcagatagaccagcgagtgatcattgcttgacgctgtttagcggtcaatgggtttaatgtgttcggatatgcataagcagaaccgatcagaatgtaaaccgtatcagcaacagcaagggcttcccttaccattttctcatgaccatagtgaaaaggttgaaaacgtccaattactacagctttatcatatttgtgtttcataacgtgctccacgtttaaaggttaatcataaaacagacgcaattattaaaacaccaaacaatccaccaatgaaaccaaagaatagtgaaatgagtattgtcaatacgatctgttttatgttcattatagtattctcgttttagatgtcaagcccccaaagagggggctttaaaacattatttacgagaatcgaaaatcactttacccgcataatccgaacccattacagtttgaggtacgccacctttatagcgggtagagtagttcatctgtacatccagttctttccagcggatcatttccggtgtaatggtgcgttgcagggcggcgttggcttctgcttctttcttcgctgcatacagacgggcatcagcatcacgttcgttagcgattgcagcgttttcacgcgcctggcgatcggcttccgcttgttttactgcttgtaatgaagtctgttctactttttgcagttcagctttagcagcgttaacctgttcttcgcggatcttcgtgttagttacctgttccatgataacttccggcagggtgatatcctgcaagaatacctgtttcacagtgtaaccgtaaggccgtgcataatcttctacttcctgctgaattgcgatttgcagttggttttggatcttcgcatcaaacaggtcttgcgcttttggtacggatttaccaaattcgcgaacagtggaaagcagtttttcagttacatacttatccagtgcctgatcctgattacccgcgttgatacggttgatcggtgctttgctaccgtcgaattgcagcattacggtcatatccacagtggatttaaatttatcctgggacggaacctgtaatttgtcgaacttcatcgcgatgtctttggtgctgaacgtatcaaacgttgccagcgggtttacaatgtggaaaccaggcagtacgggtttcggtgatactttacccatgaaggtttcagttttaaccgtaccgtcttgcacaatggtatacatgttaggcaataaccacagtgctgcgactacgcccagagcgatcagagaggttttcttcgggttgttcacgatagtgtttaagttcatcataatttccataagttgttgttcaattcgatagttattctatcatcacatttcacgctgtcaaactatttttaagaaagttttgtcagcttgtagattgtttgatagcacaagcccttaatctcgtccaggatgttcttcaaagaactatctactgattcgtagatctcgtttgcttcgttggctattttacggagatacgccaccgtgtcaagcacattttcggtttttagcacaggtttgtatcttcccgtgattcctatgtggatttcggtgaatttatcaaccaaatcctgcatatcttcgtaaaaaccctcatatgctttatgttgtgagtatgaacctgttgcaaaatgtgcgctatgcatataggtaacggacataaggcacatgccaataaaggcatctatcttgcttgagttctcagattctgtaatttgtttaaatgattgcatgatgatccctttatgaacgatggatacttgcaaactcatacgcgaccctaatccctagctttgcgcattcggattcagatcggcattgtttttggcgccattttcgttccatgtagttgtagaatagttcgcttgtatttacgctgggagggatcgttgtgatgtatacttgaagggccgcattgatataatcgtcaaattctttctgaaccggacggtcggcggcgtgtgttgtgggtgtcatcatcaacaatccgaacagcacagccattgatatgcgtttaatgttcataacaattactcttttactcatagacccactataggtctactcctgtatatatttatagcaaaaacgaggccgaagcctcgttataatatttttgctgtaaagtcaatcaagtaatgtcataccaacacaaacttctttcgaaagcgcgtattttgttcacgttttctacgttttcatcccaaccgatcacaccagctttcatacgtttcagttcctgacgtaaacgggtacgtacttttgaatcaattttctttactgcaatagaaagcattgcgttcagatcgccatgagctttgttaccgtcgcgacacaaattattatcaaatcgaatgtatgcacatcctgatttgtgtttccagttggttgagtaccaacgtaacccatccggatcaataccatgttgagcataataacgagaatactcttttacttcttcgatcttttcgttagatgaacggtcacgaagaggattgtatttcttacggtaagtgcgactcataatgatctccttttgtttatgcttccactgtatcagggttgttctttagttgcaagtagtgttttcgacaaagtgaaacatatttgtcttctgccccgatctcaatctggtcgccattagcaacaaatttgccatttgcatcaatacgggcaacggtagttgctttctttccacaatgacaaacccctcgcaactccctgatctcatcagccagcgccagcaacatataagaaccttcgaacaagttcaactgaaaatcggttcttagtccataagtcattacgggtatatctaattcgtcaacaacccgacacagatccatgacatttttcctggaaaggaattgcgcttcatccacaaacacgcaagaaaccagattcgggctgtctctataaaaatgattgttgtgaacatcataatacaagtccatatcaggcgtgatcatggtgcatgttgcttccaacccaatgcgcgaagagatactctgtttaccttctcgcgtatcaattgctggtttgtacatcaggatccgcataccgcgttcctggtagttgtatgcatcagtgagtaaacgagcactcttgccagcattcattgatgcataatgaaaatacagtttagccatttatcctctcaacaaaatctggggtattctggaattttccttccccttcatggtttttgcatgttttgtttgaacagtagatccaccaatcccactcatcataagggggtttggtaatgttcattacacaaattaaagggaaatgacaatcccgacagcgaacattttctataatgtttgcgttagccatgtgtataaccgcccatttcgctatcttgtgcttgatggatatcaagataccacatattgattttgcttttcagttcgtccatttccttactcagacaattgtcaacgatacatagaacattaacagtttctttacgctgcataatgttgatgttattcgctttcatcgcttgcgccaatgcattacaggttttaaccagtgcggcgcgttgtcctttgattacggcgatccgtttgttcgctttcttaatctcccgacctgctttgataggatccatcatgattaattcgccttacgaggatcgaaatgaacgacaatgatcgggtaatcaccagtcacctcattaataatgcgcttaatgagttcccagtcgcccccagcgaggccagcaccgattaaaggcgtgatgataggctttccagtcttaacggcgtcagcaagccctacagcctgtttaaaagcattgccgattgcgtcataatcgacacgcggcccaggtgtccagaaatcatattgagtatatgcattgaaaacaatgttgcctttttcgccaatgtaaacagaacaagttccgagcttatcacgggaaccttttaacgtattggcatcaacttgaaatgcaccaggaatacgatcgcggatttcgcgagcaataccagcgcccatattgcaatagcagttgcatccgtggatcaaatggccttcaccgttcagatacatattgacagcattacctttcacttctttaatgatcatttttatttttccgatatagtagggccacaacaaggcccatcaaaatcacaaggatccacaatacagtgaattgaacccctacgctcattttctcgctttccgttcacggcggcgatcttcttgatggcacatatataaaacaccaccaaaaattataaaaccgataacaacgcctataaagtatccagcactaaacatagtcatcatccccgcaatagtaacaaggcccagtgctctcatgcttaccagcattgtacgccaagaacaccacaaccgccgccataataataaaaatccagatagccattagtaaagtcctatgccagcattgaattcgtcaaccaaataagtacggaacttttcgcaccgttccttatttggcgcttgtttgcatagattcatcattggttcagactgcaaaaactctttttgtttcagcaacttaccgcgtttatacaggtgagcattttcctctccccacatataagcaacatctaactgttctgcgatcacttgcttacatactgcgacatctttgatatcacgattgttgcataactcatccaggcgagcatcacccgcgtgagcaaatccagcaaccagagttaaaagcagtgctaactttttcatgatgattccttattcatcctcttcgataggggtataataatgcgcattgcagatatacgcaagaacttttttcagagacatatccgagaacgtcggatcctgatttcgtctcatcccactaccagtttcaacagcccaacgtttgttagctggattgtatgtcagccagtaacaatcccattcagacagagtatgttcgaacagatcgaaacgcttacgcccgtttgcttgcggcctgacaaaaggttcaaccatttctaaagcggttaaaactcgattgatgtttgaaccgtcttcatccatcgcgatccgcaaacagtattggttaatgtccggatccataccatcgatacccagaccgatagattcgaaaaattttgttgccgcgtgataagacacactggaagaacgatattccaacatcacggggatcttttccccgtccttgacgttgttaatgatatcctgatcgatgagttcaatcaggtctcttttctccttgatcaaggtagaaatttcttcttgcagcggggctatctgtgcatgaagttctttgatccgttgatcaatcacggtcacttcgaacgctaagtttctcattgtacccattccccgtttttatcaatgtacatgatccaatcagcaaccgcccaatgggaagtattgcctttcggagtcgccacgacgtaggaaccagctttaaacagtacgcgtttagtttcgttcaggatcaggtcgctcataatgtattcctcatttaaccaaagtgaatcgtgattcataagcatcgttcgggcgctcatacacagtatccgaacttgtaatgacagtgtacacggtttctttcacaagatccatgattttctgtgattctccccagacattgatactaaaatacatcccatttttaggaataggattgtattccatatcataatacatatccatgagttcacaaatgaacaggcggcgctgttcgttatcatatgtgaaataaatgttaaaacaatcgagagatttactcaaagtaatctctttgataacgatgttgtcttgtttgctaaaatgttcgcggattgcttgcacacaacgcaacaggttagggtaatcatatttttgtgaaacaatgacttgatgtgaaacgctcataatgtattcctctcaattagatgcactcataataaaaaagcccccgaccgaagtcaagggctttttgtcaaatgatttgtttttcttctaacagcttcgcggttgtattaaccatacgagcataatcacgggcttctttctttgtatacttgaaaccagcgttatagctcgccagcgcctttttcaagtcgcctttgtggtaatcaagccagtactccagttcatagatcgcatacttcgatccaccttgaagagtttcgagctttttgattactacgcgtttaggatatgacttatccattcgtgcgctggcgctccttgcggtaacttgccagcatccataagcgtgatggccttttttacctttaccgacattctcacatgcgcgagactcgatccagacaatagccgctaaatgataacctaaacgtttagccttatctttttctacaggttttgcagtcttcaaatcatagttgtgtccaactcgataagcatactccagaacctctttctgcttcggtgtgatattatccaaatccttgatgtaggatggagaatttttgtttgccggaggcttcacagtagccttttgtaaaggcaattgatgagtaggcaaatccgcaatgaaatcccctagcggatccgtcgcagcgttgccagaaaaagagcacaagaaaatgctggcagcaattataattttcttcattttaatacctatgttgcaaaaagaagggcaataatacaccctattttatatttatgcaactattttagatagttttcgcgtcacgtagtttatcagcgataaactcagcaatgttataatttgaaatagccttgttaggatcgtatagcgcaatgatttcatctaacgataccataacggcatgtttaaagtagacgctccagctagtagtaaggatctcactgttgtcaaatccacaatcagggctgaacaatgcgcggtatttgtacccactgtatttcgtcagccgattcgtgctgtgcgcatcactggtgatcagaaaagtcccctggtgagtttcaacaacgaaaaagtatccgaggcgttctttgttgtccagcatcttttcaaacttgcgatcggtttcttcgcgaacaatacgagaagtcagcatttccaacactttatcgtattcgggccaatcattctcgatcacgattgcatcaaacggtttcttaccattaatcccgcgcccgatttcgattttcgtgcaaatttcgttgaacgttttcaaatcttctggcgtcagttctttaagatcgctcaattttgctacataataacgtttttctagtttcatttatggaaacctcaattcaaaaataatttcacagagttaccacatttgggacatgtgataaattttttcacgacataatcagcagcagagaaaaatccattgtaaatcgcttctctcttttgctgtatatcagatagttcatattctaacccacttttacagcaactgcaaacagtaattagttttgggctatagatgacagtaatcatatacacctcacaaaaagggggctttcgcccccatcattagaaattgtcttcgacaaacgccgcgagacgggaacgatacactgtatcaagaatgatatggcttgagtgttcgtattctttcagcttttcaacagcccatacaaacccgttgttaacggcagtgtttctagggttgtcgatctgcttaatgttcccgcatagtatcagaagtgtgttctctccgcaacgagaaatgatagatttaatttcgtggttgctaaggttttgacattcatcaacaatcagcacagaacctttgcccggatccggatgtccgatactgcgaccacggaagtaatacaggctagggaattgcaccacccctttttcaatcaaaccttcaatgtatttttcagattccggattatccttaaacagaatgttcaggctagtaatacaaggttcgatagaaggccggagtttttcgcccaatgtaccaggaaggaagccaatttcacttgataacgggctatctgacttcacatacatcaagttagcgtaatgtccactattaaccaggtgcatagcaccggaaacagcaagcattgttttaccagaaccagcgccgcccataatggtagcaacatcgatttcattgctcataatggattcgacaaaagccgcttgcagagaatcacggggctggatagctttcatgagtttgcgtttcatagcctgttcgtgcttaacaggtaagacattcaagcaaatctcatcagcagtcaccacacgcccgactaactcaccatttgaggtaatgtactggttaggataaaaatcttcgtcaggaagcgaactgtaagtgatttgggctacattatccgtatatcccaacacttccacggtatcccaaaaatcagggatctctacataaccggaatacaacacatcgctatcttttaacgtatcgtcgccagtatactgttctaccttacacccacgggacattgcgatcagcaacatcataatatcgcgagtaactaaggttgcatcctgttgcatacaagtttcaatgattctttcgtcttgcttgtcaagagcaaacgttttgtttccgacataatcaaccactttaagggtgatagtgtcagacagtgctgggtttgtcaggtttaaaggaatacctgatttcgtaatcgcatcatatgactgaccgaaaataacttttgacagaagccggatcgccaatcgtgcttcgtgcgctgttcgttctttcgttttcaggtgatctaattcacccatagtagcagaggtaataatgatttctgtaccaggttgagtgaatgaatagattgaataggggttactaatcaaaacattggtgtctaatacgtattttgacatacattaaccttatgtggtttcgttaaaaaatgcaccgaaaacctcttttgctttccggttataaacggattttgcttcttctggagtgttatagtaccccaaaaattttctttttccatctatgtttatctgcgctttgtacttcccattggctttatgataagaaacacctttcaaccctgtactactgtttgagttacatttctttttcatcgcattttgctggttcgtcgctttctgtaaatttcttgctgtatctccattctcaacaccatatacatgatctacgataggaggaagataaccattctcaacgtaaaacactattcggtgtcgcaaatacatagaacctttaaaatgaatttgggaatactcgtttttgcttccggcttcacttccaggagacatagggccgcgctgaaatttccaatacactttacctgtagatgtatcaacatctacaaaattcagaagagattcgatcccttgaatctcttcatgtatggttcttgatgaatagccatgacttttcattacatacccagcgaaattacgtgaatatatgctaatggatgtttcttttgtacacaatgcatgagtgtattatacacaatgtccatgcgttcattgcgcgtaagatcacactcatcaaaaataaggtttattgcctggtgctctattcgacgtccacggaaatgattaagaattgcccctttactggtcaatacatcacatccggtagcaccatttagctgtttggcgtcttgtgctgcatttaacgtatgcgctacgtaaatgttaagagaactatgggaacgtttcataaaatcaaacgcgcctttagtcttttgcgtttctctgcccagatccagcctggtttcgaataccataaaatcgttagggccgtaattatgcgttggttcttccaactctcgcataagatgcatcttacgacattcttcaattgtctttacataaaattcactattcatgttttacctttaaggggccaaagcccctttgttacgctaattccacatgcggggcatcaatgaattttgtttcgatcggaaggttcggatcatttttccagttgataccaaaacgcagtttaacacccagttcatcacctgcttgtttaacagcattcaggacaggcaaccacactttagggtttgtttgccagccttgaggcaatacgctaggatacagatccaccgcatcacccgtgatgtgttttgagttcattgtttgagatacacccttacggacgttctcgcgctgttgttcaacagtacgcagaccttcacgtacaccaaaatcaacaggagacagttgcagagcacgttctacgactttcaccagttcaggcttaacgcctttcaggttgttcaggcttttctgactaaatttaaacataaatcacctcttgtaaaaataccctgtttgggtacacagggtatttatggtttaagaggcgcaacgttttacatgtaactccaaattgcatcttcctcgcgatcgcgtttccagcgaatcgtcatttcaacactttcctgtttgtcatcaagaggaagtttatcattattgatttgttcaacatatgcttgtgcatctgcttcgctacggaacaacgcatggaaattataatggttgcgccccactacatttcgatccatcaatgaaaaatgactatggttttcccagtcattgtagatggtaatgccgttaacaaacagcccgattccacgatggttgtacgggaacccagtgacgatatgtttacgacccatttctgctttaacaccagtgatgctaaacacttcatacagaatagcaccaggtttaatgtctttcagttgagcacgtttttcaaaagcattcataatatacacctcataattagttttcatatacagattaccatagtcaggttatctgtcaacagggattatcgttttttgatggaaaagttaactggaacaggcgatcttgtaatgcttcgatccgttcatacgcttgtttcaggatcgtcttatcttctgggttcgttgtctcgatgcagatcagttcgtctgagtcgatagcgatcacatcatccatcagtgaagcgaatatgttcacgtcaggatgtgtcaattcctttatctccgcttccattccgtcatgctgggataacagttcgatgatatcgcgctgtaaatctccctggtacgggaatccggtttgaagatggttaataattctttctgctttggtcatatttcacctacaaaaaagcccctttcggggctgggattaaatgtctttgcactggcaaacaccgtatttggtgaaaggcttgtcaccgctcaggtaagaccagaaatcgcaagcctgttcagcggtttcgaagattgcagcatcatagaagccgtgttcttcgttaccatctttattgaggaacacaggaagccagctttgcggtttgaagcagtcagtaacaactacccaaccttctttcgctttcattgcttctttgttcgcttcaaccatttccagcatttcgttcagtaagttcattttaatccccttgtttatctgtttcgttgtctacgagagagatattatcacaacggggattagtgtcaacagttattcgaaacgaattgtgctatttttgaaaaacattccagaacacacagcaccagcgatcggtttaccgtttacacccgtagccgtaaatccggttgcgtatgtgtctttttcggaacatgagaaccagctatagccagtgaattcaatgttctcatacccttgcgcttccaggatacgttgcgcttctcgttcgtcggtacaactcgattgcaggaatacacagacgacgaccaacaggatacatccaattacttttaacatgttacactctttttaagttagttttgcttgctttgacccagctaacgccaggatatgcgtcaacattaccaaggcacacagttgtgtgactgaaagtgttaggcaaatcgattttatgatctggactgatacccaaatcatgtacgcttacgtcagttgcatacagataaccaccggacatatacaaagaattaatagatccaaaagcatcgttaggccatttgaaaaggtatttttctccccacaattcgacttcatacacatcgtattcatcgaacagaggatcgttacccttcgttgcattatacaaagcactgcgccattcatacagttttgcttcaatgtcgctaacgttgatctcttcaccagcgcttaaattatcaagcactttctcaagggtgcggattgctccgcttaactcacggtcaagattcattctataccttcctcttttaacacttcccagatcagcttatccatgtgcatgagattccacataacggaatcatgagaacccagagatcgagagtagatcactccccatgaacgatacgccttttggaattctgctgcattggttgcattacttgcggatagtaaagatggtctttcttgcaagtatagctatggatacgactctgccgttttttgaagtaccatttaccagtttcaaaaggcgctgttgtaaaattcattttgcattctcatacatagttaaaattgcttgcatatgttccggtgattgtggaacccctgcaaagttcactttcaaaaagaaattcaaccgatcttttatgttgcactcatcgagtccaagcgctggtaatgaaatgttttcaaaagcacgttgttcatgtctttccatttcaccccaaaacaaacgggaaccgttaggcatcggtattccaatttcattgttccagaatttcatgatagttgtcaagcgttgttttccgtcgatgacttctacccatagagattcgttgaattcactatcaaccgcgatcgcgatgataccgcaaggaaacccagtaatcaaagtcttcatgaaagcatcttgctctttctgcttccacacgtagggccgctgataggacggattcagatccagatcgttgttcttgaaccagtgaatgtaactaccaaccatgatcgcatgatcgcgactttggaaagtttttaactcacgaatacggtttcttacaatttcgtctgtcattataaaatcaccatccagtatataatcgtaatcataaccgctacagtgaaacacattgcagcgtacacccgcgcattatgaacctgtgttttcaattctgcgatctcttgatccttttcgctttcaaactcttcgcgagtaccataatacccaggatcgttagcagttgccaatctaaccgcatctttttcaaccagcgttgcataaccgctttttatttgtgtcgccccgtaccatccaccccgatcattgttaatgatcagatggtcgcctttttcgttatgctttgattcaccaacgacaataacccgcttaccattcataatatgatcctcaaaggggccgaagcccctattttgcgttcttctgtagataatctaacagatttccgctttgatgtaaatccaaaactttagaaaacttctctgcgtttctttcgtttgtgagttcgtcgaaatgccatacaccatcatcagctattaacgcgccaggtgatgaacctgtttctacatcacgggaaagcgcaagccccagagggtgtaagatttcgcggttaatgcgccaaacaaggcccatttcagatagagtattaaaatcgacgtatttcatattatgcctttggtttcacaccgtaggccaacataccaaaacgatgatcattatctgcatctttaaacagaacttcgttaccatcaatgcagatgacctttgcttccggatcgatgtatggaagcaaccacaaagggatcaggcgtaggccgctatgttcatcccagcgactgaaattgagttcttccagttcatcaagggaaagctcattaggatcgatataacggaaccatttggtatttttgaggcggtcggggaagtttacaatttcttcatagccgaattcagcactccatgaagagtaaatagtgacttcggatgctttggttaaaacagcatcgcgaattgatttgcagatatcgattaaagtcagttgattttccatgatatatttctcatcttgctaaaattttaggcagtagttgccccatcgttttacgtgcatgtgacggaatctgtgagatcgggacatatttaaaatcatccatttcacgtatagtccgtccgttcttaacgaaagttgatgcacaatagcattcttccgctactgggtaatcttgccctacatagaggaataaagcaaggttttttgttttcgtgtaatcgagaacacccagactaaccaattcctccgcgaacacttcaaatcctgtttcttcgaagcattcgcggatcgccgcgtcaatatgagtttcgcccttttcaacatgccccttcggaatatcccaatggggcgtttcagtggcatggcccatcaacacggcaccatctttaacaaagataatacccgctgatagttccatttattcacctgcaaaagcgttatcaaatgcttcaagtgcgttgttagcgcgagcactggcttttgtcacaccagcctggagattttcaaagaaagtatgtttccacacttcgcggcgactggattcatgttccagactgtttttgtgatcaccgcgaatctgttcttccatgtcataacggtacagatcgagttctgcgtttaatttctgctctaatgcctgtgcaaatacatgttcaatattcattttgtatagcctatttcagatttaaggttttcgagggtggagtgataaacaacattcccttcgtgtcgagtataccatacttttccgttctggttacactcattcattacattttcatctaaaccagggatcggcttcatgctgggagaaaacgtgatagacatcatttgttctgcactatcagcaaacccacaagggaaaacagatccagttggtttatcaagatacatcaactctactttagccatagatttcttcgaaatcctcacaatcaggcaaatacgtttcacagaaggtgcaaagcgtaaagaatgcaggttgacgaataccaggattatccggtagatacatccagaaggtgttagcaaacacgatgaatgttttcaggttttcggtggtaatttcgctaacaccatcatacccggattgattgatcgcgcgttgcagtggcacctcgtactgttcgcaatagtcggcataatgatcgcttgttacaaggccattagccattttaatcaaatcgacgattttcatgattttacatattccactttaacaggttttgcaacaaatttatctttggtgcgcccatgaccattacacaggtcacattctttgttgaaatctttcatatcttcgacccatccagaatctggcaacccagacggatatgcgttataacgaatggtttcataaccttttccgttgcatttcgggcaaacatgaggacgttcttttttagcagactctgccagttcgcgaagggtggtagaactaccataagcccgacacatgttttcaaagtcttttaaagtcattctataaacatcaatgacgttatatttttgccggatggtttagccataatatatttctcacttaaagaattttttgatgaaagagatagcaaggccgataccaaagaaaattaagtaaccttttccgtcaccgtgcgccaaaacatagagtgagctgccgtatgcgatgagttctgcgatgttcattaagtttctcatgatatcctcctttttctatattaagtatcttaccataatataaaccaaagtcaacaacaaagtattatcaacccacttatcaccagtcattagtaatcccctacaggttgagacgccgcaacactcaggatcttgaaagtgcaattgttccattcacaataagtttttgcgcaatgaacacttcctttcataacaaacccgtttgagaaaattaaccagtaaagtttcatgatagcctcctttgtttcgacaaggccaatataacaaagcccctgcactaatgcaagggcttttttcaatttttcaacatccaaagttgcggaggacaatctttagaagcgattagacgatccaagcgggacataacccgacgataaccgtcgtattcaaaattaatttttggtggaacgtagttgacctggattgtttttctgttagctaaagaaacatactcagggatcaccgttcgtaaccgtatagcgatcactggcttctcttcgccttcgttaaagaacatttgaacagttataggacaagcaaagattttaccatttacccgacgataaacaataacttcctgtgtcccttctgttttggccttcacagcgtaggttagaacataacacgaataatgatttgctagactcatcatgatatcgcgataagtttcaatatcttttttaatcgatactgaacggtctttaaagcgatctgaaatgtggtcagcagtagccgctaccttgattgtataccagtcacctaacgcgctagtaaacgcctcgctaacttcttttcgtacactgttaacaagatacattaaacgtgttctgttcatataatcctcactgatttttgaagtattcgatctgacgcaaacgcttttcagcggcggctttcgaattgtattcaccaagttcttttgtgcgatcgtgattcaaaacaacccacttatcgccacgctgttcaatgtgttctgtaatatcttttaacgacttatccagatccagtgattcagcctcttcacagataatagtcaaatccacgggcagtgtcaacaaccttttcactccgctgatatcatcaagcatcgaatcgtatgcaagggttacgtgcggcttgtaatccggataatcgtatgttgcgccagcatcaatagaatctttgaaacggctatgcaggtattcagattccaggatccctacaatagtgctaccgtattttgtgtcccacttttcaacatcaaccagtttagcaggttctgtgatgtcctgttgcgggaacaaatcaaccgttttccggctgtatacgatcgttgtatgcatcttttcggctgaaacagcattctttgtgatacctaatgtcttttgaacatttttcaaagcctcacatgaagcctgatcgaatttagcacacatgtagataccaggatctacaacaggttttgtgatttcaagaaatgatttcataaaacaccccaataaaaaaggggccgaagcccctttgtaataaatttgtttttacgcttcttcgccaaaggcggcttcatcttccgcgactttttcgacttcaacggaagggatcagagcggataccgcgccaatcactgcttctggggttactggctggcttgcgtcaatacccagtaccgaacacaggtcggacagaagttgacgatgaaccgacagttcactttctttttgcgcgataacttcgttaagatcgaatgcgcggcctttcagtaccagtacttcattttgcagtttttgaatatcagacattttattacccattgttaaaatttaaaagtatcgagcactttgctctttagttgtttcaaagtaccttcgttagtgatgatactatctcccggttgaggtgtcaaacctttttccgtggaatgttcatcaacaattccggtatcttttacaataaacacaaacttagcacccaagcgtttcaggtatttatattcgtgttcctgacgacagtcagttaccagaagatgattgtattcgtcaccagcatatttattgacgaatctttccagtgtgtaacgaacccaaaccgtgttatcatacttgcatacgatatcagttccaaacacttgcatcaagcgtctgatactccagggagtatcgttactcataatcaggttatcaatatcatcaggactataaacaatattgtatccacgttctttgaggatttcaagcccgattttgaaaatatttagaacatcttcattagacatcacaagaggtttctctcgatcaccttcataaaaaatagcatccggatcagaatattgtccttcaatcatattgcgaatgtatggtttatcgtaaccatatcgctgcattgctactcttaacgttcttttgataccaaatgccagtgcttcacactgaacatcattgtacgcctcttgaataaatttagcaaccgtatctttaccagttcgcttttttccactaatcacataaatcattagctcattctcttttgagaagtgactacttttccgtcaatttcaacttccatatgaaggaagccaaaagttgccatacatgtaaccgcttcatcactatcgttagtataacccaattcaacctcacccaagtttgttgggaaggcaccataaaatctaaatgtggcgatcgttttcatctgggagttatccaggatatgcacagcgaatgattgcttaggatcatcccacgcaacagagttaaactcattgtaatcgtttgtgctcaacatccatatgtaaatcccaagatacgatctcatttcctcatcgactacaaagcggatcatcaaaggatcaaactcaaaagccgaaccaggtactttacctcgaaccatcatatttgcaggaatatcaactgctgggaggttcattgatggtagtgtaaccccttgaacttgtaaagtcaaacctttcatgtaactgttatcaggaatatcaacccgaaagtttgtaggtgagatttggtttaaaatcatttctgtagacataggatctcctttcctctatttagcggggaacgggatcaaagcggcctgacggggtaatataaaaatttgaagaaaatgcttgaccttttaaaatctttgatctataataattattaattaaaattttatcaaaaagatctaacaagatcaagtaaaatttaataaataatttatcaaaaatttttagatctgatcttgaattcataaattttatgatctataatatattaatattttattttatcataaatttttatgaagatcaatacttagatctaataaattttatgctttttctgaaaacttttcctttaccccgtcactaaatactggtactatgttcccatattggaaatcaggaaaaacaaaatgactcacttgaaaaaattcaaagaatttctgaccgaaggtaaaaccctcgctcgtaccgtagcacgtggtcaacgcgctaaaacttccgataaacattcaatcggttttcttcacttcaaacatggttctgatttcgaagttttagcaccggattctcacgatctggcatacttcggtaaaaacattgtacgtttgaaaggtatgactactggtaaagttcaagcggcttatgtcgattgggctaaaggtactgtttctttctacagtggcaatccggatgatgatctggatttcgacaaaccagaaaaattcaaagctgctactctgtatgaagaggcggaagaaaatctggatctgtataaccagttagcagaagatttcgaaatcgagatccctatgaatgaagctctggtgaaaggtaaagtttacaaactcccaagcaacgatatgcgtcttctgtacactgggcgttctaaaactaaagcaagcggtgaatatgcagtgtttaccgtagtcgatgcttccggaaaacctcgcctggtatctggtaaaaaattcacccaggaatataaaggcgatatggtttctaaactggttctggctgaatccgaagatctgaatgaagcggctaaaggcattcgcgaaaaagttattgctgtgatggtgaaacgcgggtttaacgaaaaagatgcagaaaagatggttgacaaaaacctgaaagatgctatgaaagttagacctggtgcgacccctggcaaacttgcagaaatagttagcaccctgtaaaaataaagccccttcctttcggttggggcttctgtatatggcacctgtatgaaaaaatatggcaatgatggaagcatcaatgatgaaattgctggaatcgttgatttgctaaaacatgtaagagttgaacccaaagagggtaaaatctattggactaatcctataggaaagaaaatgaaacctggacaagaagcgggttcatacaaaggcgactattggattatatgcttcaagtatgcaaaatataggagacatcgaataattttctattatcaacacggctacttacctcagatagtagatcataaagatggaattgacgcaggggattctatagataatcttcgtgctgctgatgcaaaaggaaaccagcgaaaccgattaggggcgcaaaagaatagtaaaagtggtgtaaagggagtgcgagaaaaaagaggtaaatgggaagcaaacattagatatgaaggcaaaacgatttatattggtacatatgaaaatatagaagatgcgaaactagcatatgataccaaagcagttgaattgtttggagaatttgcaaaataaaagcccctttcggggctttttagtatctgttccagactttcttcgcgctgtaaggcttgccctttgaaacaaacgcttgtgtaggcaaccaaactgatttagcccagtcttttggggcaatctctgctaatggtgatttgaggtgtgatggtagatatgctttgatcatttctgttgcgcctcgcatacctttcacgttaccccagttaattttaagcacggtcttgttagagaggcgtttagtggatccgtaccctcgcttcaataactcttctaaaaactcctgtcgtgctctgggtggcgcatagtgcaagttcaaaccatagaacactaagttacccgctttcgatcttccggatcctaagaaaatgatcagtggaaatctatcccaatacggcagggtgtctttatattttgcatcatatgcaaacgtgtacaggcgacccgttgctggttttgccacacggtgtgttttgatactggttttgatgaaattaccaaaccattctgttgaatctttctgtcgctttgccgccgatacaccaacagtgatctttttcagactattacggaaatcgttgatgatctcgatcccgtgttttttacggtagtcattacgttttttacgggcttctgtctctgcggaacgtcgttcaatctcatcatcaatctgttttttgtaacgatgcattgactttgtgaacgttgcgtagtttaatccctcagaatcggcaaaacgtttagcagaaacacctttcgtttttgccttacggaatttgatccccagttcaacccaatcactcaatttgcgtttgggtggtgctttgggtttatcctcttccgcgatgatctcaaactcaaaaataaaactcatgtttccctccagggattactgacctcgccacccaaaaacttttttgagtgattcttctgttacgattttgaactgccagcctttttgacggcatagctcatttgcggctttccacttatcaatattaactgtataggtgtaaagagcatcaataaatttctttttattgtgtacgttgttgtttactggcttcggtggaggcatggtttctttaaggggcttaacctcccaaagatatgtagtaccattttccatttccacatagaaatccatgtaatagcgtcttctcttaccgtctgcattgcagaaatacgggatcactatacattcagaattccaacgttttacgtgtgggtttttatccagccacttcataacgtagcgctcccacgatgacctatacgtaatctttcgcggatcgcctttatacttctgtatgttttcgggtacaaacgaccctttatacgtctgtcttccagccattgcgtaaatcctaaatagaataatataacgtttagataggggaacttatcgtgctattttcatacttcccgcctgttgattacaaaggcacccagacaactgatattttccgagactatcgattttattttaatcgtgtgattggaaaatataaaacccgtagttaccagataacaggcacactacgacctgaacaacttgcagaatcattatatggaaaccagcaatactactggatcctgttgatgcttaactctgtttatgaccctttctatggttggatctccgatcaggaagccgcgtatcagtgcgctatacagcgttattctgaggttggcggtgaacaggttctgtatcacgtagatgaaaacaacaacaagtattataaccttgtcgaagaccccaataaccctggtcattggtatgacaaaggtgacaaaccaatgctgtatttacagtatcaaggtgtattagctcctgtagatatttatgaagatgcagtgttgcaaaatgaagcaaaacgaacaataaaaatcattagtccgtctgacatccaggcgtttctgaatgattttattaaagaaatggaaaaggctaactcatgaaattaggcggaaatttacactcccctttctttgatggggtggttgaaaacgttgatgatccgcgcgggttgggccgtgttcaagtccgtgtatttggacaacacccagcccaaaaacaaaaatccgatgcaatcggtgttcctgttgaagatttaccctggatgatgcctattcaggatattagaagcgctgcgatctctggtgtgggcttctctccaactggtatcactcgcggatcctttgttgttggttattggcgtgacaaatggcaccaagatggtatgataatcggtactgtcgctggtgaatatgtcgaacaaccagacacacagaaaggtttttgcgatcctatgggtgaataccctcgctatgttggtaacgatgttaactcccttgcattaggtggtttgaaaggcaaaggatcatcaagtgtcatcattcgtgattcaaacacaagcatagcagtaaacccagacgatcgcccactggatgagataccagaagataaccgccctgatacgggtggatttacgatcgaaaagatgctcaagcaggatgaggggatccgcacacgatggtatacagacagtgaaggatatccgacaatcgggatcgggcatttgcttatccgcgaaaagactcgcgacactgcaaaaattaacgctgcgatcagtaaagcggtaggtcgagaagtaacaaacgggacaatcacggcagaagaggtatcaaccttatttgctcaagatttagccaaagtaagatctgatattcagagaaccgctaacgtccgtgaagtgtatgtgaacctaaaccgtcctcgtcaaatggcgatcgaaaacatgtcgtttcaaatgggcgtcggtggtgttgctaaattcaccaataccctaaaagcgatgaaaaatgaagattggcaagcggcttataatggtcttcgaaattcactgtgggctagtcaaactccaggccgttcttctcgcgtgtctaaaatcgtcctcacgggcaaccttgaatcatatggggtgcaagtaccagatccggaagggcgctctctgagtgctgcttacgctgcgtataacggtgctacattgtcggctactagtccggaagatccgtttactcctggtgatacccgtgtgatgtttgaagaaccagcatcatcttataatgcggaatatccgtataacatggtgtttgaatcgagatccggacacattcaggaattcgatgataccccaggatacgaacgatataaccgtgttcatccagcagggagttacgaagaaattcgcccggatggaacccgcgttgttaaaatcgtaggggatgattatcagatcgtgatgcagggccggaaactcaacgttaaaggcaacttacaggtagttattgaaggcgatgcgttcatttacaacatgggtaacgttcaacaaacggttgatggtaacgtaactgaatttgttcgtggaaacgttcaacaaacggttgaaggtgagtacgttggcctgattaaaggcaatgctgaactaactgtaaacaaagatgcaacagttaacgttgatcagaatcttaccgcaaatgtgaaacagaatgcaaccgttgctgtaacagaagacgcaacggtcactgcaaaaaatgcgaaaattgagattgaagaaacgatggatatcggtgctaaagatatcaatatcaaagcaacgaataacacgtttattgattctggcgcattaacaaaaatcactggcggcacagtacaggtaggctaacatgattatggattatgaatcaataattgatggaattatgcaaaattatcagcatccttgtgatgctgagatccccgctggctattatcggcgggttatctggcaagggcatacagaaaattatccggctgttggggttgagtgggataccgagataatcaaaatcggtactcatctttatactcaagaaccattcggacatagaagcacggatctacctgttgtcaattcaccaggaacagatccaaataccggacaatcaacagggatccttgttccaaagattggctattatttcaacactcaagcagaaattgatgcttacattacatctattggtgcaactaaaatcaatggtggtaatgattggtatggcgcggatctgtcaaaatcaaacctatacaaaaaccctggcgaactggctatgtataaggtcgaaaacagtggtgggtatctttccggaacaaaccctgtatgtgatgctcgcatacgtcagacgtataatcaggacactggcgcattcaccaatattgattattattggaatggtaatcgtatagcctatatgaagcatgatgaaacaggggcgcatcaatgcaaatatacgggtatgcaggttaacaccaacgcagatacaagcattcctcctgttcctcctgcaatgccttccacttatggggcattaccgagtgaattaagccgtgctgatatttcgtgcattccggcaactgttggtttcgcatatacaaatatcagtgatgctatgttacaggcatggaacgaaacccgtaatacgttcaagctacagtttaacatgttaacgggtgctgtacagaatggattcgggatcgcgacaatgtttgatggtttatccgtatcgatggaagaagtaatggcgggggcgctcgcattgtcacagcaagcatggcaaactgctatgaaagttttcagacaagtgattagcgctgcatttaacattatcggtggtgcatggggattgattaatcagttcttgcctcaagtaaccatcttaggtgttgcgatcaacatttacgatctggtgtttggtgataattctgttcagactttgaaagatgcgtttaatgcaatcatcaaatccggacaacaaacatatgaaaccgtcataaacgcaatatacggggccataggaagcgcatacaattactctgtggaatatgtcaaagctggcgctcgcgaccttgtggatgcttgtagcgcgttatttgattggtgtttaacgatgttccaaaacggttgcgttgcattaatcgacttatacggtcggatcatgcaaacatgggctatccctccggaagtcccaaacccgttatggtctgcggtgctggctatccgtaacatcatgatgcaaatcaaaccacttgatataattctgggcggtaacttccctggattcactgcaatggatttgtatcaacaagcacaggaaaaagtcaaggcttttgttgatgagtcatacgaacagatccgagggctttatgaacaggggcaggaactttacaaaacgttaaaaaatcagattttcgaacgtgatacaattcagagaaaattcaaccagtacttaaactggatgtggggcgctgtaacagacgaagcaacagcggcttatcaatctgcattggatgctgcaaacgctgctgtagctgcaacacaggccgcgtatgactctatacaggaacagattggatctctacaagatgcaatgaaagatacatacagcatggcgatggaagaattaaagaaattgcctttgatgagtacaataaacgagtttttaggcttctgtggtgtcgcatttgacgatcttctcaagtcatatgaaaatgcgattactggtgctcagtctctgtacaaaaatttcattgatagttcgcgctcgtttaaagatcactgcaaagtaatctataaccaaatttgtacgttggcgttgagtaaagtcacacaatatgtgaataaattgctgtctctcataggattagcaatcaactttggttctattagtgtatgtgttccaatactgaaatactaaatagtcgaatgatcaagaggaatttataataatggctactgctaagactaagactgtcaaaaaacagattaaccaaatccccgatatctttatcgggggtactttcgaagaaattaaaacagatctgattgattggctgggtggacaagaagagtttaaggattacgatttttccggctcgcgaatgaacgtactgatcgaccttctgtcgtatgctactctttatattcagcagatgggtaacacagctctatttgaatcgtttattcgcacggctgcattgcgtagttctgttgtacagtctgctcaagaactgggatatatgccagattcgcgcacggctgcaagtacagcagttatgattacggctgctaacccactgaccccaacatcgatccgtatcccgcgcggtacaaaattcatcggtactgtaaagaatacagacagttattcttttgttgtatcagatgacgttgttatcgttcgtgatagtaataacaactatacatcaatgctgaacctggtgcaaggccgtttagttcgtactgaactaatttatgacggttcgagtatcctgatccgagatccaaacattgaccgtagtcaggtacgtttaactgtaaacggcgcacaatgggacgactggacaaacgaaagcattgtaaacgcaacaggcgcaagcacgatttactacatgcgtgaaactgttgatggacataccgaagtttatttcggtgaaggtgaagcaagtcaacaagtggcgggtggcgcactaaccgccgaatatatcgggggcttgaaacctgctaatggttcgactatcgttattgaatatctgtcaaccgatggggaagcggctaacggtgcaaaagattttatctatgtcgatacattaaccaatattagcatcacggcgattaaagagaacccaaccaacacccctgattatgtcggtgctgatggtggtggtgacccggaagatatcgagcgtattcgagaactagcccctgttatgcgtgaaacacaacgccgttgtgtaactgcatcggattatgaatccttcctgtctcacaggtttggatctatcatccaggcggtacagtgctttactgataacgaaaaacctggttatgctttcatttctgttaaaccaaagtcaggtttacgcctaacatcggtacagaaagaagatatgcaaacgtatctttcgaaatataacctcgcgacgatcaccccgtcgattatggatcctaactatctgtatattgtgcaatctgtaaaagtaacgtatgatatcagtaagttgacggaatcagaggaatggttacgcggtcaggttatttcgtcgatcgactcttactatactgacaacgttgaaattttcaacaaatcgttcagtgtatctaagatgttgacttatgtcgatcagtctgatacttctattatcggttcggaagcagatattaaattgctccgtgaaattgacaactattacagtgctcctatgtctgggatccatttcttgaaccaggtggaatcgaaatcaatcatttccagtacgttcaagttcaccaacgaagaagacgaaagttatgttgttcgttatgcttctacggaaatggatcaggatggtaacgcaaaaattgtaataggcccgttcaaggatggggatatttcgatcgctgcttatacaggtgatgactttgaaaaattaacagatgtaggaacccgtaataaatattacgaagtaggatcggtgtctcattataccgatttcattagctttgacctgggcgttctgaacgtatccgccgatagtttcagtgctgcttatatcgagctaaccgcaaagcctctcgaagaaaccatttttactcgcgatggatcgttgatcgtgtttgaaaatgacctgcgtcctcaatacaccacattgactatgaatcctatcagtcaataatcgttaacccctgtcttcggataggggtttttctttttataaatacgtgatatacataaccgcaaatttggagaaatataatgattaaagcgccttcgattacgagtttgcgcgttgataagctggctgctaacttcgtttaccttaaatgggatgatgttggcatggatttctattatgtggttgaattggcccgtagccgtgatatggacggaactattattccagacgaagagttaatctggacgcagttgggttatagctacgaaaacgaatggtttagcgatcaggttgccccaaatacacgttataaattccgtattcaaacaactcatgaagggtttgaaccttctgattgggtgatcagcgatgaattatggacgtttgatgagaacgcctacgcatatacaaccatgcgtgaattcacccctgctgattcgtttatcaatgaaaaattcgccaaaaacaatcgtgattacgtcgattttaacgatgatgttattatggcttctctgatggttgaggattttgtatactctcccctgtattctgatgtaagccagatcagcgataagatcctgaaacaagaaagctaccatgaaattcaagatcacatcgaacacgtttgtaatgatatagatcgcacgttcctggtatactcaaacggattgctttacctgtttgaacgttttcagaatatggctaaagtgtcaaatgacaaaggccaaacgtggtattactacaaagcattaaacgatcgtgtaggcaatccggtttcccgtaccgttgcttatcagagcgctaacactacgtatgtgttaggatacgatcgcatattttacgggcgcacgtcaacagatattcgttggtcttctgatgaagttcgtttttcttctgatgatgtaacgtttgcgaagctggggaaccagtcagggttagattttgatgttgattcatacaacacatatgcgcgtctaccgggaggagtgtcgaagtatgccgaagctatagcttgttctaatgaatggctctacgtggctgctaagaacgttatgcgccgtattgcgttacgtaacacaccaattgatactgatcctggttcgccgacctttggtgaacgtatttttgatgaagtttcatataccatcgtaccaggaaatgataaaattgttgttaaaaaaatggacgtgctgaatgaccgtctatacgttctggtaactggtgaagttaaaacggcgatgatggatccgactgtcaaggctaacgtgatcccatcaaacgatgctggcgtttatctgtgggatgagaatgcaaagacgtttacccgtgtttatggtaaaaccgaagatgaacgtttttatatcactcatgaatataccaatatgtcaaccaatggcgatgaagtttacatttctgttggtaactacaaatatccaggcactttgccagatctggatctggttgaaaagtatccggaagatgtgcattcagcggtgaaatacgatcttgttcctggttatactgcgagcatttcgattaactttgctacagttcgtgcaaatcagaacgatcctacagtatggaactttgggccgcaagagtactacaatgaagcaaactttagctggcatttccgcgataaggttagcacatggatcaccaatgataaccgtcctctggtggtttatccggaaaccctgtatactctggttactgatagcgcgtctcctgcgtcaacgattcgtgtaaaccatgaagtttgggacaaaggaacagttactatctacttgaataatatcaagtttactggttttacgaagtacacaaacggtgttctgttgtatcgctcaggtggtaggataattggattctatgaactgtcataccgcgcaagggatgaactcactattttctggaaacccgataacactttaatggtggcaagtctggttaatcaggaacgtgaaaacccatatacgccggatattgaacctggattaatcgaccctgatctgagtcacatgatcactcgttttgctccgcaaagctatctggacaaccaacagttcgaaaaatttggtgaatactatctgcaatacatttcgttgggaagcaacagttactataacaaattgctgaacctcatccggaacaagtatccgagagagaaaaacaacgtcgaatatttgtggtctgaaattaaccgccgtaacatttacctggataaaaccaaacgtgaggcagtggttagatttttcgaatcacgtgcaagcgatttctattcaacaaaagggattgaggcaagttatacgttcctgtttaaattgctgtataacgaagatgtttccgttgagatcgaaagctccaacagtctcgaatatgatattttggttagttcaacaaatatcagtcaggatatcgtaggccggacgatctatacaccaactggacgcgctaacgttacgtacatcgaacgtgaatatgaaaatggtcaattgcgttggtcaatgactctgcataatgctcaaggtaactttatcgaagggcaggttgtcaagtcagaaaaaaccaatttcaccggaatggtaattcgtggtgttcgcggtaaacaaatggctaacaactcgatcgactatatcaaccgtggacgatcttactatgtgatgaaaattcgttcaaatctaccgacttcccgttataaggatgacgtattgaggtttgttcatccggtaggattcggctttatgggtatcacgatgttaacagtattcatcaactctggtttgtcaatgactcataacgagacaatcattgatattctgagaaactaccgtttcgatagtggttatcctaagttctggcctgatcgcattgcgagtatggacggtaacggaaaccaacaattcgacctggttactggtgaacctctgtacaccgcacacccgcgagcgggggaaccttttgatgtacctccggaatatgacattgaagaaaaaccgcttaacggtgttcttccttctgcgcgacggttcgatcaaagcccgttgttcgattgctcaggcgttaaatattcacagttccgtaatttggtggataaacgactgaaagatgatgcaggaaacccacgtgatccaaatcctccatcacagattaaggtaggaaattaaatggcacaacaaaacttgtatcggtcggtaattactgcaaaattccgaaccgaaaacttgatgaacttcaaagatatgatcggcgatgccgccgatctaaacacgatttacatgtctattggacgaactgaatcgtggtcggataacgaatccgaccctaacttcgcccctccatatccaaatgatagcaccgatggtgttagtgatatgtggacgcatatgatcggggctactaaagttcctggtgatatgatagatgcaattttaccacgtaaagactggggtgatactcgttatccaaacccgaaaatcttttactttaacgatattgttgttgtaaacaccgcaccttataaccgtactgatccgggtaaaggttggatggtttatcgtgtggttgatgttcctgatatcggttcttgctccatttcgagcattaccggaaaacttgaatgtatcaggatcggcggtatctggagtccgtctcatgaatctagtgaacctccacgcggagaagctaacgggatcgacatgggagacggttataaatgggaatacctctacacaatcccgccagatgtcgtgatcaaccgctgtacaaatgaacatatcgtagttcctttccctggcgaactggaagaggatccggtacgttggggttatgataacgtgattcaatggtatccaggacaatacgatctagtgtatcggttgaaggtgaattcaatgcgttttcgtgcatacatggattctcttttcttcccgcaatctacgcttcctggtaacaaagggttccgtcagataagtattattgtaaacccgttgattaaaaaggcaagcccgaccgagcctgaaaagaaagcaactggtgattactataatgctaacgcgcttgaacctgattccggacgtatgatttacatggaaaacagacaacctattattcgctcccttgatcagactgaggaagtgagtattgtattcgaattctaaggaaaaacaatggcttaccaaacagcaaaaaaactaattgatgtcggtgaaatcggcaacccatcaacaggcgacccgctttatgatggtggtgttaaactgaacgaaatgatcaccaacgtttataatgcgtttggtgatgtgcgtatgctgtctgcaaacgaaggtgtcggtaacatggtgatccatgctaccggatactatcagaaactaccacgcacttactattcaagcacaccgatcgaactgggttccctgcatgacatagatacttcaacaggttcgattaccgttgttcttccttctggtaaggttggcgaaggttgctacttcataaatagtacgggtagtgtctctgttgatcgtcctatcgcgtttcgtcctcaagttggggatactatcgcgggggttgcagaccagttgtatatcacgtcaccttacacctttgtaaaaatctggtgtaccaaaaaagaaggtgcggtaacaaaatgggattattctgtagaatctatgttcggttctaaaacgatgcctgttgacactacggcgcttgtactgaaagcaaacccgactgctattcctatgttcggatatagcgaatttagcggggctaaggtgcttgtatacgcagaaaacttagctggtacagttaccaaaatggcagaagttttaatgaccgtggatcgtgtacacaaaacgatttattcaacggaatatgctattttgaaaaacagtgaagatgaaatgtttacattaaactttactgtcggtgctggtgatgttgtatacgctaacgtgcaagcgatcaaagaagatcgaattaaattcacgattaaagcaatagatacgattaaatcagggatcgcgtcatgaaacaagaaattttaataggtcagattgtagacgatggtacaggcgattacctgcgtcgaggtggtcaaaagactaacaacaactttacagaattgtataacatgctgggggatggtgagatcccccatccagcaggtgcctggaaaacttttgcgggtacgacgctatcaccaaaatttggtgaatcatgggcgttgaataccagtgcaaacaaaatcaccgtaaacctcccgaaaggcggcgtaggcgattataacaaggttattcgtctgcgtgatgtgtggtcgcgttgggctaccaacaacgttagactgatccccgcaactggtgatactatcaaaggttccccaactcctaaagatctgtttaaagattttatggatgtggaattggtgtattgttctccgggccgttgggaatacgtcgaaaacaaacagattgacaaaatcacaacttcggatctggcaacagtagcaaaagaaacgtatattgctactcagggacaaactgacttccctaacgtattcggtgttggtaatgaatacaacctgcaatcgttcgaagtttactatcgcggtaacttgctgttcatcgatgagaaagacggattcaatgctgataactcagactatggatcgattggctctgctcctggtgaactggttgcacttgatggtaattcagtacgtcttaaaaacccgtgtaacgctggtgacacgcttcaatttgttacctatctagatgggttagcaacatggcgttcgagctatgaagcgtatgtgatgcgcatgtatcagactggtgatacttctctggaaaccgttcctggtgaacagtgggtaggtgatctggcaaccaaaaaagagtttacacctgctgaatttggtgttaaccctcgcgtgttgattaaccctaactcgtttgaactgcttctcaacggtaaacaactggttaaaggcggtgacgctgactatccggcgttttcctgtgaaggtgcggaaggtgttgatgaaagtacgtgtgttggtaactctggtgtatgggttccgtcaggacaggattatagtttagtattcactgattctgtagtgacttcaatcaagtttgctcagaaactggaatccggcgacgttgtaacgatccgttggtttaacaatgatattggtactctgatggattgggaaggaactggcggtattaaagaaaaagctgataaggtttatctcaataacgaagaagaagttatattgatgaaccgtatcgaatataccgattataataacccttctcagaaaacaatgcgtaatacaggggaaacctatcaggggcgtattctggatattcaggctatgtttgatattatccacccgatcggaaccatctatgaaaacgcacacaacccggcaaaccctgctgattatatgggatttggtggttggaaacgttacgcagaaggttatttcctggctggctggacatcaaatgtaacggatcctgatttcgcattaaacaataatgatttagatagtggtggtcaaccgagtcatacggcaggtggtactggtggcgatcgtggtacagaaatcaaaatcatcaacgttcctgaacttgtatcaaaagataaagttcttattgctgatgaaaatggtgctgtgattattggtggttgtcagttagatcctgatgcttctggccctggatacactaaataccgtgaggatacattgaaagtgaatcatggtaacacattacctgataaaatcaaaactattccaccgtatatgactgcacatcgctggataagggttgcataatggcttacaaaaatatttcaaaaacaagggagggcgctcgcgtcctctctaaagaagcagattacttacagtatgatacttatggtaagttgcctctgatcggcggtaaacgttcgatcggcgaaccaaacattgaccaaacaaaacgcggtgttctgtatggaaacgtacaatccgcaattgatgacctgtatacgcttatcgagcaaatcccgattaacggcgttgttaccatgactgaggatgcccctccaatcgctgtacagcaggttgagagcgtttcttttgatggtattgtacagaacatcgattcagaccaagaacaggctgtagttcacgtgtacggctttcctttcatctttgataatgggactaacgccgcaactgtttgtgaaacggcatacaacaaatttactgaattcgttgcagcggaaaaatatttcgcagaagttaaccgtaaaggtgttgatggtacgatcctagaatgtcgatttattgatagtgttccgcacccggcaacaaatatctcagaaaacggtattcgtcaaatcggaactatcgacgtagccgcaaaaagtggctatggttcatgggttaagttgggttctggtttcttacctgatgttactccgcaagtaaccgtgtattacttcaaacgaattgcataaggataacacatgagtaacaatacaatcaaccacgtaagtgataaatccatttacgtgacatttgacccaacaggtactgattggcctgataccataaccaacgtacaagatgcgttggaaaaaataggtagttgggcgcgtactgatactgggcttcctatcgcaacaacttctgttcgtggtattgctcagatcgcaaccgaagctgatattaacgctggcacggataacactaagattgttactccgaaactgttagcatatcgtatgcagaaccctaaagcatcacaaaccgtatggggttatacgaagtattcgactgatgcggaatctacaaccgtaactaacgatgtatcgtctattactccgcgatcgctgaactatgtgttcaataaccgcaaaggtacagaatcggtttggggttcttctaaaatcgctaccactgcacaggcggttgctggtacagataacactgtaactatgactccgcttaaagtcaagcaagcgatcgcgtctctggttccggttcagtcaagcgcgaccgaaagctcgcaaggtttggtacaactggcaacagttgcacaggttcaggctggtacgatccgtgaagggtatgcaatttcaccttatacgtttattcgtttaactgcaactgaaagcaacctgggcgttattcgtatcgcatcacaggcagaagcaaacgcgggtactgatgacaccaaagcgattactgcgaaaaaattaatcaatacccgtgcaactggatctcagttcggtgttgtcaaattagcaacaactgttggttatgtggcaaacactgcactttcttcaaacgctgcggtattacctagtgatcgaaatgcggtaattaacggttctctttatgagaatagcgcaatatataacaacaaatatcagacgtggacagatcttgattggcatttcccagtaggtgctattgtcatgactggttttcagactgaccacggtagtttgtatatttgtgatggtcgctcactgaataaaaataactatccgttactttttgagcgtataggttatacatttggtggtggcggtgattggtttaaccttccagattgtcgaggcgttgcagtacgtggtcatgaccgtgggcgtggactaaaccctaatcgtgggtatggtacatatgaaggcgatatgttgggctggcatgaacacccattacagcttatctaccagaacggcggtaatattcctaaatggcaagcagtttacgaactgaaaagcgccgaaaagaatgaccaaagcgctcgcgtatttgatgcttctataactaaagccactggtgtgggtggggaagaaacccgcatgaaaaacatcgcattaaactacgtaattcgtactcaatagaggttattaaatgatcatcgacaaattaaacccgttgccgaagatcccgtttgttgatggcgtcccagatgacgccacgactcaaacgaagattatttggatcaaaaacggtgaaactctggacggttcgccagataaagtgtcaaacactggtagtcttaaccgaactggtgtaaacatccagcagaacgcggttcagttagaacaaaataccatcacccataatgataaaatcaacgaagtaatcgatcaggttaacttgattactgaaaacattgatgctattggtgatgagagcgtaatcaaaaaagttaaccagttggatcaggatgttcgggcattaactttatctaacacccaaacacagaacaaggtagcacagttaaccctttctgtaaatgctcaaaacgatgaaattggtgaatacgatccagaaaaagatcctaaacaccgcacaattcgtaatgatatcatttacattaagaaagaagttggttcatatcctggatttaacgttgatggtgatgttgacccctcttctactggtactggccttaaataccgcgtactgagtaaccaacgtgctatttctatgcaggaaactcgcataaccaaactggaagatgattgggcgctttccgaagtaggacaactgacagaagaggtaaaagaacttcgtgctgaaatgggtgattctggtcttgccacaacccgatcaatctatgcgcgaatcaagatccttgaggatggttctattgtaatgcaaaatgaacttgatgcgattaatagttatatcggtcgcacgtcaagttcaaccagttccattaacgatcgtgtgaacagtctggaaaactccgttagttctctggctacacaaatcaatgatccggtaactggtatcactgcacaaattgcaaccattaacggtcaaatcggtacggcttctgctcagggtagtatccgttatgatattgcggaaactaaacgcagattgatggatatggaaatgattctgggtgaatccggcgatgatggattgcagggacaagttgcgatcttaactggtgacgttggtgaagattcagatcctaccagtatcaaaggccgtttgagtgttgttgagggtgaattacgcaccaacactagcgcactatgggaactgcaaggcgttgtaggtaactcttctagtggcctcgttgcaactagccagcaggttaacaaagaaatctatggtgatggtgttagtgccgatcctgttactcgcgctggtttgaaaacgacaacccgcaacctgttcactcaggtaggagataactccgaaggtaacgaaacgggcatttatgcactgattgccgaccttactaaacgtgttgaggatttagaagcgttgaacattgcacaggcacttgcagatcgcgtaactatcgaagatctgaatgctaaactggctctgtacatcaaagaagctgacgccgatctccgttatgagagcaaaaacccgcctctgtcattcggtactaacctaactggtgatactgaatacactactggcgatccattgtctctaagcgtaactatgactggtggcgtttctccgctgtcttaccagtggacgaaaaacggtgtaaacgttggcacaaactccaacacatttaccatcgattcgctacagccttctgattccggaacttacaaagtaacggtaactgatgcaagccataaagtcatcgtttctgatgaactggcgatcactgtcgcttaacgattaacaaggggcttcggccccttttgaggatctttatgattacgaacaacccagcacaattaaaagatgaaattctgcgccgtttaggtgctccgatcgtcaaaatcgaagtgacaaccgatcaggtttatgactgtattcaacgagcattagacctatatgcagaatatcattacaatggatctaacaaagggtatatcattcttaccctggggccggacaacccgaaaaacattttcgatctgagtaaagaacacattttcgcaattactaaagtgttgcgtactaacatgggttcccttgtatcgatggatggtactgcggtttatccgtggtttactgatttcctgatgggccttactggtggttctctgggcgggggtggttgtgcatcacgtacctacggaatgaacgcatacggcgcggatatgggctattttacccagatgatgagctatcagcggtcaatgcaagatctcctgtctccgcttcctgattactggtataacgacgacacaggacagtttgcagtatacggaaccgttaaagatggtgatattgttgttatcgaagcaatgatcagatcctttgttgatgtacccagtatggtcggtaacgtctctggatacgctacagcgggttctgatggcgaagataagccaactatagcagatatatacaataacccctacaaagccgtctcaggcggtgtgaaggctggtcaaggtacaagcgttcagggttcatcctctgcgtataacaaccgttgggtgaaagattacgcaactgctcttgttaaagaggtaaacggtcaggtgctggctaagtttcagggtatgcaattacctggtggtgttgctccggatggaacccgactgattcaggaagctatgcaagaaaaagaaaacctccgtcaagaacttctgttactgtctgatgcacttccagtgttgatgatgtaaggaggaaaaatgcaatttagattatatctagtagagtttaaaacttctacgggaataaaaatatatggaggtaaacgccattctccatttaatgatcctagacatgattgttattgcggatctggggtatacatcaaacgagcattaaaaaaatatggaagagaatgtattgttaatatacaatggtcaaaaccgtttccaaacaaggatttattagcggaagccgaagaattacttgttgatgagttgatagcatcttatgataattgtgttaatttagttcgtggcggtaaaggaggtgcttctttttataatccagcagataaccctaattttggttctaaacgatctattgaatctaaaataaagatgtcagaaaaggcaaaaaatagggtttatagcgaggaaggactaaaacgaagacaggaagccactagggtcatgattcaacacagaaagcctcgtgatgtttctggaagcaaaaacccagccgcacgaagggtaattgtggatggagtagaatactcaacattgaaagaatgtggagatcattacgggataactaaaaactccgtctttagtcgaataaaatctaagaaatgggagggatggaattatgcgtgattgggatgataatttattcgcacagttggaatctggcgaaggtgttgataatagtttaaaaacggaagttactaacaaatacgttaactggtacaagtataaccctactcaacagttgcatgattcactaacagccgaagcaattcaaatgaaatctccggatatgtattacgtccgtcgagaatttgttaatattgataaaattttgggcgaagaccgtgaatcgaagtttacaaaatcgtggaaaattgcagcatacatcgattcgtatgcaaactacgaaggacagagagacttttacagcaaatttggtatgatgtcaaacgatgaaatgacacttgtgatcaatcctcgtttatttgcacatcaaactgatggcgggatccctgttctgggggatttgatttatttccctatggataacagcctgtttgaaattacatggattgagtttgacccgttcttccagttcggcgatcgtcctcaacgtaaaatcaacctcgttaaatttatctatactggtgaagaattggatcctaaactgcaacgaaatgaagggattaatcttgctcccgatgctgatctggatctcgaacctattcgaaatcttgatggattggctgataccaatattgaacagtacgaagaagatcaagcctttgaagatgaaggcgatgaattcattgaatcgtttgatgttgttaacgggcgcggatcaccgttcgcacagttcccataaatataaccaggggaaaccctatacatgtaagggtataggagaaatcttatacccgctttaacccatacaggaaaaagaaaatgtttggctactggtataatagttcgctgcgaaattatattgtcttgatgggttgtcttttcaatcacgtgcaagttaaacgcattcgcggcgaacaagaaaaatttatcaaggttccgattacctacgcatcaaaagaaaaattcctggcatccatgaacaagctgaactatgcatacagtcaggaaaatgttgctaaaacggaaacaattttaccacgtatgaatctatccctcgttgatttgcagtataacgcaattcgtaaaacggggatcgcggtaaaccaaaaaatgacgcagttacgcgcacctggaaaaacagtaacgcagtttaaccctgctccgtatcgtctcatgttcgaactgggagtgtatacccgttacgaagatgatgtgtttcagattatcgaacaaatactgccatacttccagccgcatttcaactgtcgtattacagaattacataaaaacgacattaaaatagaccgagatattaaaatatctctgcaatctgtttcccctgataccacgtttgaaggtgatacaacgacacggcgacacattgaatggtctttaatgtttgaattacagggctacctgtatccgcctgttaacgagattaaaggcgagatcagaacagtatacacggatttcttttccaatatgaacccgttggacaaagacaatttcgaatccgttgatgctcaggtggatccggctgatatgcctatacaggattacacgggagaagaatacattcaaacgtatgctaatgatatcccaattcctagcggtgatcaacctcctaaaccgaggggccaataatggaagaatttagcgtaaaacaactacttgatcttgaaaatctccctggtgctgaaactggggaagaaatggttgtatatgaaaaactcgaactcgttgatgtcgagtcacacccagcagatcgaaaacctgatttagaggaagactatgcacttgcgcgtaaaaccgcgcattacatgaatcagatgatcatggatatggcacaaattgccttgcataacgctaaaaactctgaatctccgagacacgttgaagtttttacaaccctgatgaatcagttaaacaattctaaccagggattgatgaaaattcataaagaaatgcgagaaattaccgaagaaacaacaaaaccaggatctgaaaaaggtaatggcggcggtaatgaaatgaacatagagaatgcaactgtatttgttggttcccctacggaattaatgcagaaatatggtagtgcatacgaaccaaaagaaggcttcattaatggtgaagcggtagaggtaaaccctgatggaaatggaaccgacgatcgatccgagtaaggaatcagatcacccaatcggattaatgcatcccgattatctgaaaaagaaaattgatgaatttgggatggagtggacgcaaagcgaacatgataaaaaatggtatccgacaaagtttagtgattacctaaaaattaacggtatccataaagttgatattcaagcaaaagacagttcaaactttgcgacttataaaaacaaaggaaacaagaaaactcgatataacggaaacccaaacctgaaacgcgcgtacatccaaacgaaatggacgcaacagatgttgatggagtgggttaagtgtcgtgacgatattgtttattttgctgaaacatattgcgcgatcacccacattgactatggtacaattaaggttcagttgcgtgactatcagcgcgaaatgctgatcgaaatgcataaaaaccgtatggttgcctgtaacctgtctcgccagttgggtaaaacaaccgttgttgctatcttccttgcacactttgtgtgtttcaacgaggataaatatgttggcgttttggctcataaagcctctatgtctgcggaagttctggatcgtacaaaacaggcgattgaacttctccccgatttcttgcaacctggtatcgttgaatggaacaaaggttctattgaacttgataacaaatgtaaaattggtgcgtttgcatcttctcccgatgcggtgcgtggtaactccttcgcaatgatctacattgacgaatgcgcgtttattccaaactttattgatgcgtggttagcgattcagccagtaatttcttctggtcgtaaatcgaaaatccttatcacaacgacacctaacgggcttaaccacttctatgatatatggaacgctgctatagaaggaaaatccggcttcgtgccatacacggcgatctggacatcggttaaagagcgtttgtatacagacggtgatgatggcgtatttgatgacgggtattcatggtcttcgaagatgatcgccagttcaagtaaagaagcatttttacaggaacactgtgctgaattcatgggaaccaacggaaccctgatcgctggctggaaattgtctaaactatcatgggttgatactgatgaaacagaaactaatttttatcagtataaagctcctgtagagggacataaatatattgcggtactcgacccagccgaagggcgcggtcaggactatcacgcgatgcatattatagatattacatctatgccgtttgaacaggttgctgtatatcattcaaacaaaacatcgcaccttattttgcctgatgtcctgttacgttatcttatgatgtacaacgaagcatgggtttatatcgagctaaatagcacaggccactcagtggctaaatctttgttttctgagttggattacgataacgttatttgtgatagctataatgatttggggatgaaacaaagtaaacgatcgaaagcgattggatgctcaaccctaaaagacttgatagagaaagataaactcatcataaataacaaaaagacaatacttgaatttcgtactttctcagaaaaaggtgtttcgtgggctgcggaagaaggtttccatgacgatctcgttatggcgctggtttgctttgcatggctaacaacacaaatgaaattcgcagaattttgcgagaaagacgatttgcggttggcaaatgaggtattcgcacgtgagcgcgaactgctttatgaagatatgttatgtcctgttatcgtaacgagtggcgacgaaacaatatctgtcggccaacacggtatttcgtttatataaatttagaggaaacttaataatggctttaatctctccaggcattgaaactaaagaaacatcggtacaatctaccgttgttcgaaattcaactggtcgtgctgctattgttggtaaattttcatgggggccagcttaccagatccgtcagatttctaacgaagtcgaactggtaaactattttggctccccagacaatgacaccgctgattatttcatgaacgctgtaaactttttacagttcggtcaggatctgcgtgttgttcgtgtcgtcgataaagaagccgcaaaaaacgcaaccgcgatctataatcagatcaaaaccacgatcaccgctgctggttctaactatgcagtagacgatcagatcaaagttaaacacaataacgttgttattgaagaagatggtgttgttaccagcgttgatgatcagggtaaagtcctgtctgtgttcattccgagcactaagatcatcgcacacgctaaacaggttggtgtatatccggatctgtctagtggctggactacagaaatcgtttccagttcttctggtgtttctgctacgattacaatcgacggcgtagaagttgatccgggtattactctgctcaaccttgacaccgcaaaagaaactattcaggcaactgctttccagaaactttgcaccaaatacaagctaccgtctgttattgcaatttatcctggcgaaatgggtagcaccgtaacggttgaaattctgtctaaagctgcatacgattcttcggctgtcattaagtcttatccttctggtaagtctggtaaaaacagcggtcgcagttcgatgaactttggccctcagaatgataaccaatacgcgtttatcgttcgccgtggtggtattatccaagaaacgtttatcgtgtcaaccgctaaaggtgataaagatatctacggttcaacgatctacatggatgatttctttgcaaacggtggttcgcagtatctgtatggtacgtccctaaactggcctgtcggattctccggcgttctggaactgggcggcggtacttctgcaaactccactgtaggcgctgatgaactcatggctggttgggatatgttcgcagatcgtgaatctctgcatgttcctctgctgattgctggtgcttgtgctggcgaaactgccgaaatttcgtctactgtacagaaacacgctgtgtctatcggtgaaacccgttcagattgcgttgtattcgtttctccgccgcgttctgctctggttaatatcccactggctcaggccgttgataacctcgtagaatggcgtacaggctacaaaatcggtaatactaccccagttgataacaacatgaacgtaagttcaagttatgcgttcatcgacggtaactataagttccagtatgataaatacaacgatgttaaccgttggatcccgctcgcgggtgatatggctggcctctgtgtttataccgatcaggtatcgcaaccgtggatgtctccggctggctacaaccgtggtcaactgcgtaactgcatcaaactggctatcgaaccgactaacgcgcatcgcgattctatgtaccaggtacagattaacgcggttactggtttctctggtggtgctggatacattctgtacggtgataaaaccgcaacgactgttccaagcccgtttgaccgtatcaacgttcgtcgcttgttcaacatgatcaagaaagacattggcgataacgcaaaatataaactgtttgagaataacgatgatttcactcgttcttccttccgtatggatgcaggacagtatatgtctaacgttcgcgctctgggcggtgtatacgattaccgtgtggtttgtgacactacgaacaacacgccggatgttattgatcgcaatgagtttattgcatcaatctacgtcaaaccagcacgttctatcaactacatcacactgaacttcgtagcaacctcaactggtgcggatttcgatgagttgattggttcaacgtcagtataacatgtaaggggctgaaaagcccctataaatacacatagaggttagaaaatgcttactgatattgtacgcgcctttgaatccggtgatttcgcacgtccgaacctgttcgaagtagagatcccgtacctgggcaaaaactttaaattaaaatgtaaagccgctactatgccagcgtctaccgttgaaaaagttccggtaggttacatgaaccgcaaaattaacgttgctggtgaccgtacctatgatgactggacaatcacggtatataacgacgatgcacacacaacccgtgatgcaatcgtagcatggtcaaacatgctgcatggtatgggtgaagacattacaggggatatccctgcaaactacaaaaaaaccgctacggttaaacagaaaaaccgtaacgacgaagtaaccgccgaacataccatttatggcctgttcccgaccaacgttggtgaggttactttagactgggatagcaacaacgaagtgagcacttttgagtgtactttcgcgctagactggtgggtttaaacgctataaatacaggggtagcaataccccttatcattatttttcggagttgtaaatgaacttttttggattagacaatgtgttagggtttttcaaaaatttcgccaaacaggatgaaatggaatttgaagcccaattaaaagatgatacaggttcgattgcgcctccgaaaaataacgatggggcgcacgaaatcgaaacggacttatcaaaccagcgttattcttctgtgttccaacagttctattccggacaggatccgcgaattcagaacaaaacacagctaataaatacataccgtggtatcatgacatacccggaagtggaaaacgctgtttctgaaatcattaacgaagcgattgttaatgaacaagggaaagatattgttacgatggatcttactaaaacgaattttagtaaaaatatccaagataagatcatggaagaactcgataccgtaatgaatattcacgatttcgataaccgaggctctcgtttattccgtgattggtatgttgattcgcgtatctatttccataaaatcatgcacaaaaatgaagctgacggcatcaaagaattgcgccagttagatccccgttgcatggaactgatccgagaatcggttacagaaaccctacccggtggggttaaaattttccgtggctatcgtgaatacttcgtatacaccgcaccgaaaaacggttatagctacaacggacagatttatagtcacaatgacaaggtaaaaattcctcgctctgcgattgtttacgctcatagcggccttgaagattgtgacaacaacattataggctacctgcaccgcgcggtcaagccagctaaccagttgcgtttgctggaagatgctatggtgatttaccgtattacccgtgcgcctgaacgtcgtgtgttctatatcgacgtaggtcagatgggtggccctaaagctacacagtacgtaaataacattgcacagggcttaaaaaaccgtgttgtatatgacgcgagcactggtaaagttaagaatcagcaaaataacctgtcaatgacagaggactattggctgatgcgtcgtgatggtaaagcagttaccgaagtttcaacgcttcctggtggcactgccttctctgatatcgacgatgttaaatggtttaaccgtaagctgtatgaagcgttacgtattccgttaagccgtatgcctcgcgatgatggcggtatccagttgggtaacgatggcggtattacccgcgacgaattgaactttagcaaatttattcgcgaattgcaaattcaattcaaccctgttcttgcggatccgttaaaaactaacttgatcgcgaagaaaatcattacagaagatgaatgggatgaaaacgtaagtaagattgcttttgtatatcagcaagattcttactattccgaaatcaaagatattgagattttggaacgccgtttaaacctgatgggacaacttgaaggggtggtcggcaaatatatctcccataaatacgtaatgaaagaagttctccggatgtctgatgaggaaattcaaagcgaagccaaacagatagaagaagaatcaaaagaagaacgttttaaaaatccagaagcggaagaggaaaacttttgatgaaagaatttatcgaagcaatcaaaagcggtaatctggtggaagctaaaaaaactttttactccatcatggaagaccgcacagaagcgcttcgtcacgaattacgcgttgaacttgccgaagctgtacgcatcgaaggcgaagaagacaaagaaaaagacgacgaaggcgctgataaagatgacgaaaatggcgataaaaagccagccgaggatgataaatccgataaagatgatgagtgaggtgtgtaatgcaacttgacatcgaaatcaccgccgaagatctccaggaacatttagacgaagcgaaagcccgtgtagatattctgggtatcgatgaaggcacggttaaaatcatcgaaaatttggcggtcaccgaaccaaatttagcccttgctatgatggcggttgttgaaggtttaacacttgatgaggtaattgtcaagcatgttgattcccgtggcaacgtagaacgcctcaaagacaggaaaacccgtgagcgtaatgcgtatcagacgaccggattaactaaatcccaacgtcgccagatcgcgcgtcgtgctctcaaaacaaaacgtgctaacccgtcaattgctactcgcgcacaacgtaagcgcaagaaagcattgcgtaaacgtgctgcactggggctataaatatgaatgaatcccaaatcaacgaaaacggcgatatgcttttaatcgaagaatggggtttaccttgcggtgacgtttcagaatctattttagaatctgttggggaatcaaaagacggtaaattgcggatcgaaggtattttccttcaagccgaaaaggttaaccgtaaccgtcgtttgtatcctaaaaacgtacttgaagaagcagttaacgattatattagaactcaagttaacacccgtcaagcattaggtgaaatgaatcaccctccgcgcccgaatgtggatccgcgaaatgcttgcatcctgattgaaaaattgtggtggaagggtaacgatgtttggggccgcgctgttgttgttgaaggcgacggtggtgatggtgacaaactggcggcgttgattcgtgctggttgggttcctggtgtttcttcccgtggattaggtaagctctccgattccggcaaaggctacggcgttgtacaaaagggctttaaattagctgtaggcgttgatgtcgtctgggggccaagcgcacctgatgcatatgttaagcctatagtggaaaatcagcaaagcaaaccgcttgttgagaataatagtgctgatgacgcttttcgggaattgtccgagcgtttgaaaggtctataaatacattaaacaaaacaacaggaaaatcaaaaatgcttaaagaacaactgctggcggaagcccagaacctggatactccggtcgagttagacagcattttcgaatcagttgaactttctgatgacgtgaaagcgacattcaccactgtattcgaacaagctgtaaaagctggcgctgcaaaactcgctgaatcccacattacccagatcgcggaacgttccgacgaactggtcgaagctcaggtaactgaacgtgccgctgaaatcgaaactaagctgtacgaagatgctgataaatattttgcgcacatttccgaagaatggctgaaagaaaacaaagaagccgtttcccgtgacatcaaagccgatctgtttgaatccctgatcatgggcctcaaagaagttctggttgaacataacgttgtcattccggaagaacaggttgatgtagtcgccgaactggaagacgaactgactgagaatcagcaggaagttaaaaccctgtttgaagcgaatcaggaactgaccaaagaaatttcagaaatgaaacgcaatgcagtagtttcagagaaaactaaaggtttgaccgaatctcaggtcgaaaaagtagaatctctgattgaagggctggaatattccgcaaccttcgaaaataaactcagcgcaattgttgaaatggtagcaaccaaagctgaaaaacccgttgacgagtctgtaaatactccgcaaacgaaagatgactttgttccggtagttgaaagtgttccggcagagaaatccaagatcaataaatatgtacaagcggcaaaagccctttcttaatttcaaaaggtaagaaacaatgtctaagaaaaacgaattgatggaaaaatggaacgatcttctggagtctcaggaaggcttaccggatatcgctaccaaatccaaaaaacaactgattgctgccattatggaagcacaggaaaaagacgcagaagttgatccggtttaccgcgacgagaaaatcgttgaatccttcggtggtttcctggcggaagctgaaattgctggtgaccacggttacgacgcaaccaaaatcgcttctggtaactcaagcggtgctatcaccaacatcggccctgctgtaatcggtatggttcgccgtgcgattcctaacctgattgcgttcgatatctgcggtgttcagcctatgactggccctactggtcaggtgttcgctctccgcgcagtgtacggcaaagatccgctggcttccggtgctaaagaagcattccatccgatgttctccccggatagcatgtactccggtcagggcgcggctccgagcaacggctttaccgaactggcttccggtactgctatcgctgacggcgctatcgtgttccacgatttctctgaaactggtcgtgtgttcctccagaacgtttctggctctccggttactgtaactggttctaccgccgatgctctggatgctgctgttatcgccgaacaggaaaaaggtactctggctgaaatttcttacggtatggctaccagtgtagcagaactgcaagaacagttcaacggttctactggcaacccgtggaacgaaatgggcttccgtatcgataagcaggttatcgaagcacgtagccgccaactgaaagcacagtactctgtagaactggctcaggatctccgcgctgttcacggtatggacgctgacgccgaactgtctgctattctggcaaccgaaatcatgctggaaatcaaccgcgaaatcgttgacatgatcaactataccgcacaggttggtaaaactggtttcactcagaccgttggctctaaagctggtgcgtttgacttccaggatccgattgatgttcgtggcgctcgttgggctggtgaaagctacaaagctctgctgattcagatcgacaaagaagcaaacgaaatcgcacgtcaaactggtcgtggtgctggtaacttcatcatcgcttcccgtaacgtggtttccgctctggctcgtatcgatagcggtatcactccggcaggtcaaggtctccagaagactctgaacgttgacaccactaaagcagtattcgctggtgttctgggtggcgtgtataaagtatacatcgaccagtatgcacgtggtgattacttcaccgtgggttacaaaggcgataacgaaatggatgctggtatctactacgctccgtatgttgcgctgaccccgctgcgtggttctgatccgaagaacttccagccagtaatgggcttcaaaactcgttacggtgtaggtatcaacccgtttgcgaactctcgctctcaggctccgtccgaccgtatcacttctggtatgattaccaaagaaatgttcggtaaaaacgcatacttccgcaaggtttatgtgaaaggactttgatcctaagttattgaaaaataacgatattaaagggaaccttcgggttccctttttcatttctataaatagtgaaaacgattgaggctatattatgaaacatattatctacaaaataacaaatttggtcaataataaaatttacgttggtgctcattcaacagaagacatcaatgattcatacatgggttcagggattgcggttaaaaaagcacaaaagaaatatggaatgaataactttgtaaaagaaatattacatgttttcgatacccgtgaagaaatgtatgaaaaagaaagagagatcgtcaatctcgaattcataaatcgtccagatacgtataatgctggcataggtggtaaaggtgctcctatgtcattgattggttggtctgacgaacaaaggaaaaagatttctgaaaatactgcaaaggctatgcgaacaccagaactaagggagaagatgagacaatcccgtttaggtaaaccacagtccgaagaatccaacaggaagcgctcagagacgttaaaagctaaatacgtgaacggacgtacagacagagagtataaacctctcacagaggcgcacaaggccaaattaggccgttctgtatcgatagatggagttgtatactcatccggatcggaggcggcaaaatcccttagtatgtcccactctggtttaaaatatcggattaatagcgacaaataccctacctggaaatttgttgcataaataccattatacactttacgcaggaacataaaatgagtgaaaaattttacacaattaacaagctggtgcgtcagtcacagctaccgcctggcctgtctaaaaaggttcttgatgaggcaaccggaacagaaacaattaacgtagctaatacccgtccggatctggtatctcttacccgtgcggtaaacaacctgatctacggtgaacttgtagcaattcaggaaactaatttgcctaccgcaaccctgttcggtgtgcgttatcgtaaccctaaaggcgatatgacgttttccagcgctgctacctattccggtaagtatgcaagccgtgataacattccagttggtgcggttggtactgcctataccaaaggccaagtttttaaacatccgacaagcgatgtcgtatacgaagcaactgatagcgtaactctcgcaggtgctgatattgatgaagcaattatggtcgcagtattcagcaataaattacgcctggcaagcgaagccgcgccaacaagtcagtatgaaaccagcgaagatattagcacaacttcttttgaaatggatcgttggaatatcaacgttcgttcccgtaaattcaaaactgaaatgaccgtggaacttatgcaggatctggaagcaaaccaattcaacgcagaaaatgtgattgaagatgttctgggtactgttgccagcgaagaagtaaacaaagatatcatccagactctgatcaacgtatcacatcgttacaacgttgatggtgtggtaacaaatggcattttcgatgctacaaccgcatacactgcaaaggatgctccggctttaggtcgtttcctgtatcaattagtgtgtgaaatggggcaggaaatgaatagaacgacttcatttgaagctacctatgtcctggcctcttctcgcgttgtaagcgttctgtctgcgtctggttggatgcatgaaactgatgaaacccacccgttagcaacaggtcgacttaaaaacggttactatgtctatactgacaccaatacaccgtttgattacctgctgactggttgcaagtacgatctgggtgaaatggatcatgttggctctctgttctatacgccatacacagaagctgatcaggcaggttcgatcaagatttctgttgatcctcaatccttacagcctaaagttgctattctgatgcgctacggtttatcggttaacccgtataccactgctgctaatgaaagacttgtgaaaggtgatgactgggtaaacctctcaggcaaatctaaaatgagtcagattgttggtatcaaacttcctaaactgggttgatagtataacccaacggggataatattcaataggtggagtagggaaacttactccaccttttaataattattataattaatattaaattagatcttgaatttataaatgatttatgataaaatttattaattataattattatagatcaaataatttttgaaatcaagtaaaaataaatttgattttattaattagatcatgtataattattcttttaataatatattatattagatcaaataaaatttgactacaaattaatatagtatattatagatcaactgggtaaattggtgagtatgttatgagtttgaaattagaagatctgcaaaatgaacttgagaaggatatgctgatagatcccctcaagttgcaatcagaatcagcggatatcccgaagatttgggctaaatggcttcgataccattcaaacgctaagaaaaaattgatccaacttcatgcgaaaaaagaagctgatgtgaaggatcgtatgttgtactacaccggaaggcatgacaaagaaatgtgcgaagtggtgtatactgggactactgaaattaaaatcgcgatcgctggggatccgaaaattgtagaaaccaacaagctgatccagtattatgacatggtggtagatttcaccagtaaagcactggatatcgtcaaaaacaaaggatactctatcaaaaacatgttggagatccgtaaattagaaagtggtgcataatgtctactgaaaatgaaaaatgtgtagtgtgcaagtgtccggttccttctactggttttgtgactgaatctgggcgcgtgtgtagtactatctgtgctgactacatcgcagaaaaaacaaaaaacggcgagatcaacgaatccgatgatctgaatgaagttcaaatgttgctgtaggagaatcttatgattggttacggtgaaggaattacagatcgtgatgaacgtccagatctcttagaatctgacgaacaccctgatttttagtgcataaatactagcgtacccgaaaggggcttgataaaagaatgctggatgataggcgtactcttttgcgccgtccgatggagtttaccttcggcggggtgattgataacataccttcgatcaagggcatgagtaaaaaaagccagaatagtacctcactggctataatcaaatgtacgtgttgggctgattgcgtcccaaaattaaaaagccccttcctttcggttggggcttcttttttagaacttttcttcttctccgctttctagttcggcctttaattcttcggctcgacctttcagcgcatcgcgcatagaaatatcgtctgacggcgcaacatcaacttcttttacacgatttttgtaatatttttcaagctctttaaggccgtccatagtacggcaagaggcgaccttgctcatgaaatcatcaatagccgcctcataaagtcgaaaatcgttgaaactcttcattttgacctctaaatttcgatttgtttgatcacgtagtcaaacttttcttcattgtaaatgcgtactcgttcgattgcgtgtttcataccatagtttttgtatgaatatttatttttagcatttttggactttgccagcgttgctaagttatcaaccaaatcccaaacagtagcaagagatttagaatcatgtttacgcagtacgcgcccaattgactgtttgactataacagcagatttgcacggatgcccgaagatgatgtgatgaaggttcttaacagaaatacctgtactcagtacgccaatagaaccgattacgatcagccccttcgttgactccgcgatccgtttcatttcgtttcgctcatcaatccccgtttccccagaaatgtatacaacgttgtcatatacctttttgagttgctcatacagccatttaccatgtttgatctgattgaacatcacaaacacgttttcatctttttcccttgccagtttcaacgccagcttacagatccatgcgttacgcctggtatgcgatgttatatacttgatttcgctttggtaatcggcccccttcattttcttaatctcatcctctttgtatctcatgaagatggtattaattcgaaggttggtaacttgaccttcctgcatcaatcgatttgtatcaactggcttgaagatttgaccaaaagcgccaatgtattgcatcatgtttgctttgccttctttcagagaaccagaaagaccaaacttgaaaatacactgatccattgtgttgatgatcttctgtatgctttgtcctgttgatttgtggcattcatccaccatcaaacacatgaactgctgaaaccactcaggaggcattttaacagccgattgccacgtagacacgtagatcaatgcattactgtttttagcagttcctgaacgtattccaagcattgcctcgcgaggtaaaaggcgatagtttacaatatcaccgatcatctgatcaacaagggcggttgttgggacaatgattagtactttgcctgtgtaattttccagacaccaacgagatatcaatccctgaataagagatttacccgctgacgttgggaggttaagcacagcacggcggtttttaatcgcatgaaacaccgattgtttttgataccaatacggatcaatttgcttgtttccgtcgtatactgggtgttcttctaaccacttgtcaaaatctggctgggtaatttcttctgtttcgtggatcttaggatccatccagatagaatacccgcgagactccgcgaattttgttacaagataggctaaaccgtagggcagtttcccgttatagtccatcaagtatatgtagccgttccatccaccatatttgtattttgcctggtactgataacctggcggctggaagctgaaatagtcgcgcaattcatagactatgttagcctctgcctgaatctgcacatgactagtgttaaggaatttgacttcgatatccactatgtgtatcctatatacggtttatatgaatatttataggctaaataatgataaacattggagaactacaatgagtattgattacgaaaaggttgaaggtttcaaagccttagaacaaaaagaagccaaattacagcttgctacctacgcgcaagaaacgtttgatgtcaaactgaaccgtcagaagtcattcgaaaatatgcttgctgatctggaagctgccgtaccggaagaaaaaccggaactgttgatcgactcccctgatccggaaattgttacatacgaaggtgaaccatctgttcctgatgttgctccggaaattgccgaccagattgaaattgttcccgacgctctacaagctcctacaagcgattctgagacggtttctgatgaactggcatggatggaagggtttaccccgtctatcatcatgatgggccgctctgtttcgaatactggcttttatacgtgtccgtattggatctatgattggatgaaacaaaatccggattggtacaagcaccctgacagttgtcctcattattcagcgcgtcaaaccctcaagtcgctggcatggtacatgcatcgtgatgggatggttactgtaagggaaacccgaaacagccagttctacacgttcaaaaaataattttaaaaagtagttgaccttgccctgctattcgagtatatttgtattcgaaggcgggggaatggctctcgcagtgaagaaggaaatacaaaatgaacatgatgaaaaatgcttactacccagttctgtttgtttggactaatggtgaagttaagaaaatcgtcaattctaaagctccttattacactgttggtgaagcacttcgccacgctgcggaagcaaattatcctgttcatgccgaacctggttatgctcgttggaacggttctaaatgggttgctgatacctgggacaactacgaagaagaaagaatggagtgtgatcctgattacgtatctcgtcaaatggaagctcatatgattgcagatcgtagactggataatgaagctcgcggattctattgattaacaaggggctacggccccttttcttttaggtgaaatatgaacttaaatcacgaatgtttaaaagatttgagcgatggtaacgagattggtaacgttatttttcttgatatcgatggcgttctaaataatatgcggtgcatgaaatttggtgaacatatggacatcgaatgcgcacgacacttacgccggatagtgaatcacgctaattgtgatatcgtcatttcctctacgtggagaatcggcaacagtacccataatctacgtgaaatattttatccgtggggattgtatcggatcattggtaaaacttgcactaacttccctcatagtactggaatgcgtggtgatgaaatcaaggcatggatcgatactttcggatgtaaaaactatctcattcttgatgatgataccgatatgctttcttcacaaaaagaacattttattaaaactgatgggtttgttgggttgaccgaagaacaatccacttatgcgatccgtaacattttcggggttactactccgttttgtcctgaatgcaatgggtatggacgtgttaacggctacgacaaatgcggaacgtgtaacggtaaaatactccggctataaataccaataaacataagaggctaaatttatggcaattccttctgtaacaattagcgccaacaaaaacgaacttttgattggcgaaactttgaccttagaggttgaaactactgaactagatccgggtgatgtgtttctggcctatcgttggcaaaaagacggtgtagatattccaggcgcaaccgccgatacttacacaactacggttgacggtacaactgctggcgattataccctgatcttaaaacacggtgctgatgaagaatcagcaacagaaaccacgtctgatacaatcaccgtgaccacttattctgatgatcttgtttctaaatggacggttcacccgattccgtggcgtgataccagctttaccccgatcggttattgggtacttgatgaaattctgtatcaaaaagcacagggtaaagattggaaaactgattatgctgattacaagtatagtgaggaagtacaaacgatcctgaaagcgttcatggaaaacggtgaatgtgagatccaggattcacgaaacggctatattcataaaatgagtgaaatctaagaggctttaaatggcaactgaaaaatggactacggttcatcctattccgtggagaaataccagttttacatatcttccatactggctatacgatattatcgttgatgcttttgagaaaggcgacgactggcgcgattatgcggaagaaaaatataaattagagtttgatactctgaaagaggcgtttgaagattatggtgatattcatgtaatcgaatctcgtaatggtaaactggttagtctgttgtcattgactcctgctcctgaaccagatcctgaccaataaaataaggcaaacaatgaatacacttctttttgatttcgacgacactttagcagaattttctcagactttttatgataagttcggtgtacgtccggaaggaacgccaaaagaacgatatgacgaaatggcggcttctttggtgcgtactgatttttataaaaaccttccccgtattcaggctgggattgacctccttcaatggagtttccaacgccgaatcggtgatcctgctactttgctgcttcgcgcggaagcggtcagccctctttgggttatgaaagaaaaactgaactatacagataagatttgcgctgaactggggatccctcgtctcgattttagtcgcattgactatccggaacagttcgcagaacatgcctatcgtggtgttctgatttcccgcaaccagaaacatcttgaaatctggaacaattctcatctagctaataaagttcctggtattttccttgcggaaaccctggaagaaaatattcagctagtcacggaagcgcttgcaaaggctaatcaataacaaaaaagggaaccgcaatggttccctttcttttacaatctttttaattcatcaagcgctgttttcttatcaccaacaaagaggattgctttacctcctgcttttctgaaaggcaacaccgcttttgcccgatcgtcaaacagaattcctttaccagcgaatgctgctttttcatggctacttttaacgtagtggaattctggaacgtaacccaatactttttgcaatgctttacgtttttgttcggcaacaccgtcagaattgaatttaccgacactggttagtattgctacatcaccaagtgttcttaaatgatggaataattcaaatccttctttgattggttccagattttcgtagaaatcagttttggcaatttttgctttgcactttttcaactcatcttctgtcatcatagagggttcgccatacattggcacaaatgaaccttcccagtcgaacaatacaccatccatatcaaagaaaaacttattcatatcaattcctcagtttgtgtatgcatactataatgtttaatcattaatgtcaaccccaagtgtcagttttcggtgcgtatgctgcaactttagccacaatttccttatccagttcagctacagatttctgaggcttaccacgggctttaactttgatgtagtttgacttaacaacaaacatccctttgttacttgatttcttgatctcgctatcaacaccaactttgttaaagctgatccaaatgtcgccgtccatatactgtttaagagaatcacccatgttcaggatcttcgccatagtaagggccgcgccttcgtgggtatccatgagaatttctttaggaactacacgatcgcgtttctggttctgctgcatagcaatatgcacatcgttcataacccatacgatatgtacgttttcttttttgtatcccagcgtttcgacatcacgcgcgatgcttgccagcttgctcataccttttaacgttacgtcaaagatgaggttaggtttacgatcttctggtgctgccataataccggaataaacacggttttggtttttgttggaaatgttgaaaacgtcggcgatcacatgatggagggtagatacgttttctgggtttttgaggttcattgttttgacatcatgacccgtttgtttcttgatctctgctgcgagtttatcgctacccattacaagttttttcagggcgtcaacgtccagggtaataccttcgatgcctagcagtttttccagtgtgaatcctttaccggaaccagcaccgccagcaagaataacaacctgaccgaacttaggataagcacggcctccgaaggtgatcagcgcttcggttaaggtgctttctgtgaattgtttaaatgacttcatgtaaaattctccagtttattttctattatttattgacatgctttctgacagtggtgtatggttagggtgttcgacggataggccggaagaactttaaaccataaggtatatgatatgaaaatcaatttacatcgcttcattgtagaattttcccgcaaccgtgacatggactcttacaactattactcccgtgagattgaagatctttttgcggctcacgttggattccttcgccaccatacccctaaaatgcgtcctgaccacgatccgaagtatagccctattacatggcaagcccctatcgatggttacgttgaagggatccggatcatgacgtttaacgcgatgtatggaaacgcgttgatccatatcgcacgtgagaaaagggccgaattccctaacggatggcgtattgatgaagtgattcaaaaccttatgcagttacgacgtgaatacaaagcgggtatgtgtctgcgtaatgaacagtatcagatgtataaaacgtatgcatatatctctaagcacctaattaattccatgttttacatcgttggtaatcatggttccgctatagatatcggttcttatgaaatcgtggcttatgctcgcgaacaaggaaaggccgctgcactgaaaatcattgaatctggtgctatcattcttaaccatcgcattgatactattgcttactatggtgatcaggttgaggttgaaggcgtacaccatgaacgattcaacaaagccgtatttgctaaaaatggttatgcgtatggtaatgacattataacttctgcggttcctttcgttcgtctaactgttgaaggatttggagaaaggttgtcttatagactgtcagaagctcaaatgtgcgcggctgctgaaagaatagccagaaagcggaaaatgtataccgatgaatacctggcgtatgtcaacaaaacaaaagaagatgtagaccgagaaatttcttgcatggatttatccatttgatataatgtaagcatctttttaagggaggatacatgaaaacgatacattgcagaaatgaaaacgttgtttattatcacggttcgtgtactgctgctggtattgaaagcatgttattgcctccctgtgattctgatactctgtctgaaaaaggcagaaagaaaaatttagaccgtgttttctttaccgctgatatcgggttagctcgtatatatgctggaagggccgcacgttctataggtggggatcctgttctgtacagggttgtgtgtccggttgatgttgtatgcatgaacgaagacaaaggcgcgagcgtttaccatgcagcatgggcgttttgtgaggaattatgaatgataaagtgttggcgtatctcgttttcttgttgggatatcgcttagaagtgatgggcgcgtattcatcaatgtatggtgatttaacggctatctggatggtcgggttaggggttgcttttacattcctttcctttgcaattgttaatgaatcggaaaaggatattgtatgaaactatatcatgtgatctactctggtgttttaggcattgacaaacaaatgttagttgatgtaatgtgtaaaaaactcgatgaacgaattggaacccgatacaaaaatcatgtatcggaaagtattttcatcaacgttgaccacccaaatgacatggaagaaatggtcaatactcttgatgatcagcagatcccgtttgttgataatttcaacatgagcgctggagtgtatacggtagtaacttttgttctaaaaaatgttgacagccgaaacgatagcgtgttgaatgtagttgcaaaaatcgattctaccaaaggaaaataatatgaaaattgtacaccgtagcatttccgaactgtctcaagccgaaaaagtgcaaatccatttcaaattcaatgatttgcgtaaaggttatgccgaaattgcccgtgaacatgggttagataacggcgatatttaccaggtagtacaggaaattgaacgtatccgcgcgttccgttctgcaaatctacctgttaaaaatgcaatgcgccgcgaagcgatcgaaatccatcgtaagcgtgtgtacaatttagaacgtgctaaacgtccgatgaagaaagaaaagaaacctcgcccgtttaaacgcgaacatcttaacacctctatggcgctggcgtttcaagatgcggggattatctgatgcgtaaatctgcgatggatcgttgggctagtattgctacttcaaacgtaaaaccaaatcaagccgctcctgatgtagaagcggttcgtaaagcaaaagaacctgagattgtggcccttagccccgaactcattgagcatcgccgccgtgcgtctgctattgaactggatctgcgtattgcgcgttcatacaatctcaagcatgaacacgccgcaaagaacaaccattcttttgaccttactctggaagattggaaagtattgatgacaactgaacgttgtcagtattcaggcaagatgtttagcaataaacccggtagcccgtatgcccgtacaatggaacgtattaatccacgtctgggatatacacaagaaaatacaatagcggttatcaatgctgctaatgctgaaaaatcaaatctagatgcattcgttaagggtgatgtcattctggatgaagtaaaagtgaagttgctgcgtaaagcactttatcaagtcgaaaaacgtgtgaaaatgaaaggttaaattatgtttaagaaatattcttctcttactaaccattatgaaggtaagttcatcaatggtgtaattatgaacgggcttactggcggtgtgtgggttgcgcgtgaaaagatccacggtgctaactttagttttatcaccgatgacggaattaccgttacccccgcaaagcgtactgatgttgtgaagccagccgaagatttttatggctgttcagcagtagttgcaaagtattcaccagggatccgtaagatgtgggaaaccctcaaaaagaccggaacgtatgatgatttggttattcaagtctacggtgaatttgcggggcgtggtgtacagaaagatgttgattacggcgaaaaagatttctacgtattcgatatccgcgtaaatggtgaattccttccggataacctgtgttcgctgatctctcgatctcatggcctgaaaatggccccgctgttgggatacggtacttttgaagagatcaaagaactgccgatcacgtttgaatctgttgtgaacaaagcaaatagcggcattggtagcgataatacagtatatggtgaattcgtatatcctatcatggacgttgaagagggcaacattgcagaaggttttgtaatgaaacctgtttcacctgcttttatgccaaacggtgaacgcgttgcaatcaaatgcaaaacaaccaaattcactgagaagaaagcgaagaaagcaacccgctttaatgctccggtttcactgtcagaaaaagacaaaaaccaactcgatgagtttgtttgttaccttacagagaaccgtgtgaaaaacgttctttcgaaactggatctggcttcgatcactgcgaaagatttcggtcgcattatgggcttaacggttcaggatgctatcgaagaaatcagccgtaatcatgggcctttcctcgaacagttcgaagacccagcaatggctaaaaagttgtttgtaaccgaagcccaaaatatgattcgccctgtatggggcaaaatcctgaaccatgaattttaaactatgaacagtcacggaaactatagaagtatttctgatgaaatagccgcaataagagaactccttcaatacgtttcagttgatattacttctggaaatatcgtatggtcttctccgcgtcaaggtaggagggttggtgattccgctggtactatgaaagatggatattgtgttataaagtttcaaaagaaacaatatcgcagacatcggatcatcttttatgttgctaatgggtatcttcccgctcttgttgaccataagaatggtgttgaatttggtgatggtatagataatttgcaagaggcaacgcaacaagagaacataagaaagcagataaagaaacgaagcaatgcttctggaaaaagaggggttatttttgataaaagaagaaataactatcaagcgcgaatagttgttgatggtaagcagatttttctaggttcatatgataaccctgaaaaggcttatgaagtttacaacgaaaaagcaaaagaattgttcggtaatttttatgtcgaatgattttagtacagtaattaaaactgccaagacagtaacattaattggcagtcgtaaacctcctgaacgtatcgcaaacattgctgttaaaatcggacgtgctttgaacgaacgcgggatcagggcttattctggcggcgctcctggtatggatagtcactttctgtttgactatagtccggataacagatgtataatccttcctgagaacgggtttaacggccttttctcaaacggaaaggatatcatcgactttcgagatttaaacacacagaaagccgctgacgaagccagaaaggtagcaggtaacttcgatacacagaatgaatacgttcaaagaaggtatgcgcgaaacacgattcaagttcttcgtgaaaatcttgacaatccaactgattttgttttattttgggcggaagaacgtgaaggatgtgttaaaggtggaaccgcgatcgctgtaagattggctaggttgtacagggttccatgtttcaatctcttcaaagaaagtgtattgaacgatgtgtgtgatacgttagggatcaatatcaaacccccaacgttggattttttatggtaattgaacatgcgcccttacttcgtgaaacatacgaaagatgggctgttaataacgcaataggtgaaaatatgattcatgtacgtagtatcggtactgacggcgaaactccggtagaaggccgatcccccactctcgcagaacgagcaagagaaattatcaacgatcagaatgctaagatgatcgaacatgcgcgggatacaatcacaaaaggtgttctgaaacacgcgacacaacaaaaccttatctatgatatgaagcacgatatcggctcttgtctgggtattgaatgtactcgctatgcattccaacgagtttctgaatggttggaagaagaagggctaaaattcgatacagaagaaaaacgcaacgccgctaagatcacaaattctctggctagtaagtacaatcaaacgtatagaaaccaggaagaacgtgaagtgttcggtttcaaaattcctgaaaggaaaacagatcgccgtgtaagtgaattcactttttacattagttggtaaaaaggtgttgacgggggttggttatagtagtattctaactcccgtagacaagacactaactcagaaggataaacatcatggaaatcgtaatgaaagcaacttatgctggatattgcctggaagcaaaaggtgttgctaacaatggcaaaggcttacgggccaatgttgaagcaatgctggatgaattacatgcaatgtacgaatacgacaacgtagcgggtagcgttcttatccaggcgttggaagttgatggtgttgattgtgctggttggtgggatgcttacattgactacaacgataaccgggtttacctgttgagcaacaaagattatttctaaggaaccactatgagcgatgaagctgaggctttagaagattgggctgattttgatgacgaagaagacagggaatatttctgcgttaacagtggtgcttacaaagaccgtttagaacttcgtgaacttttatccggttcctctcaaatatcaggatccaaacgaaaaagtagtaaacaaaaagttcagtatagtgatggttctgtacgtgatgaaaccgttgttgctgaattccgtggtcgggttatcacaaaagaacgacaaattgatgtaaagaacttgtatgaagtggctaaggctgctaaaataggttctgtgattgtttgccctgtgtgcaaagaaaaacacacaaagacaacgtatcacaaagttttctgttcgaatggcagaaaaaccagtaaggattgtaagtctaaatatcacaatacaatccatcccgaacgactggatcgggtattttaaaataaacctaaaacgtggagtacgtttatgaacaacaaaactttcgaagaactgaacagcatcatcacttccgtagattcctataaggtttctcactggtcgcaatatccaactggctccgaagaggcgctgttttatattgaatctcgtggtggtaaatttgatcaagtagttacggctggctgtaaccgccttgcgcaaatcctatcacgtccggtgactatggaaaacgtagattttgctaatcggttgtacaaaatgcactttggacgcgaaatcttcaactacaaaggttggaaagaaattgcagaactgggttacatccctcttgaattcagagcgattccggaaggaaccccagtagcggttaaaaatccggttgcaactttccatgctgggaaaaatgcgctgtggttagcaggacacgtagaaaccctggcgatcaggggagtatggttcccttcaaccgtagcaactctatcccgcgaatgtaaaaaagtgttgaagaaatatctcaagaaaacctccgatctcgaaggtgaagcatttgatatggtactacgtacccgtttgcatgacttcggcgcacgtggaacctcttctgctgaatctgctggtattggtggcctcgcgcacctgtataacttcctcggtactgataccgtagaagcgctgattatggctatctctctgtttgaagattgtcagaaagcgtttgatgatggtgaaatggcggctggtatttcaattcctgctcgcgaacattccactaccgtttcttacggcaaagaaaacgaagaccttgcgtacaaaaacagtattgagatcttcggagaagggatgtatgcatgtgtgtatgattcctgggattttaaagcggcggttcgccgtatcgcagaatataaagattcgattctttctaagggcggtactctggtagttcgtccggattctggtgatatggtagacaatatcatgtacgctcttgaagaactgggccgtatctttggctatacagtgaactcaaaagggtataaagtactacacccagcagtaaggatcattcaaggcgatgaaattcatggccctgaaacaatcaatcgggtgttgaactggatggagtctaaccgttgggcgtctgaaaacatcgcgtttggtatgggcggcggattgcttcaagaagttacccgcgacactcaaaaatatgcgatgaaaatgtgcgcaatcaaaattaacggtgtgtggactggtgtgtataaatgtccaaaaggcgctgaatggaaaaagagtaaaaaagggttgttgatgactatcactgatggtgttaactttaaaaccattgatactctggaacagaaagtgccggaaggctggaaagatgctatgatcacatactatgtcaacggaaagattacttcccgtgacactttagaggaaattaggaaccgtgtcgggatttagtatccgcaaaaacaacaaaggaaccgtgattttctatgacaacattccccttgtagctcgcaaggggctttttgctaaaatcgctgggtattcctttaaactggaagaagtcaacgacgaaacactaaaagagatcgtaagaattgccttacagttaagaggtaagaaagacgaacaaaaagctattgacatgatcaataaattgggtgaaactcaatgcttcatagtgaatcgtggttacaagtacgataccattgcaaaatttgaaaaagggctttgtgaattatgagttattatggtgtgatcccatacacaggaaacaagcaatcgctattacctgaactattcaagctgttccccgaaagaagttcatacatgcgtttcattgattgtttttgcggtggccttagtgtgtcgctaaacgtccctaaacccgttctaagcaacgattatgataagacgctgattgatatgtatgagcgtcttaaaacgcttcctgacctgtctccggtgcgagaattgattgcatcgaaggggctggggaaagacaagaaagaagagtatctgaaattccgtgatgaatacaaccagaacaaagatcctttatggctctatgtcctgatcctgcattcattcagcaacgttaaccggacaaacgacaaaggcgattttaacgctgctgtaggaaaacgaaccctcaactttatgacagaaaaacgtttcgaacatttcaaaaagaatgtgacaggaattgaatttcgttctggttcatactctgatattgaaatcaacgataacgattttgtttattgcgatcctccgtatctgatcactgatgcggtgtataacaaattctggaacgcagatcacgaacgcgagttatatgctttccttgactccctgcatgagcggggtatcaagtttggtttatcaaacgtgacacatcatgcaggaaagcaaaatgatatcctgatcgagtggatgcaaaaatataatgtgcataacctcgataaaaagtatctgttaggccagcatactgattcttacgaacaaaataaaacgcaagaagtctacgtgtgcaactaccagaaacgcgacgtaaatacataccctgaaacactggatgacttaatgtaaggtaacatatgtttaagatttttggttatatcccttctgtttacaattgcgctccatgcctgaattctaaacgtctcctggacgcaaaacgaaaagaatatgagtttgtttctgtagccgatgaaaaagacgcagacggcaaaccgatcctgaatgaaacggtcatttctgaactcgaaagcctgttaggtactcgtagactgaccatgcctcaaattttccacgatggtaagcacatcggcggctttgaccaactgcgtgagtacgttcgcaccctgtgataaataatgacaccttactgaatggtgttattatgctgacgaaacgaattaccaaaaaagattacccaacaatcaagcaagctctctttgagaaacaagggggctgctgtgctctgtgcaagcgtcctttagagggcgacattgaaaaacatcacctcgaccatgaccatgctttagacggcgaaaacgccggacgtgtgcgcggcctactgtgtaacctatgtaacggtacagaaggtattgtaaagcacaaattcaaccgatccggtctggtgtcccgtgatgttgactacatcgcctggttagagaatctgcttgcatatctcaagcaagactactccgaaaaccgtattcatgacaaattcataccagataaggtaaaatggttttcaagacttaccaaacctgatatgattgccgaaatggtttctatgggcttcgagtacgccgacaaagacgaacgcaaagccttaaccgcaaaatatagaaagcaattaatgaaggcaacgaaatgaaatatctaaacgctcgattatcaacgcaacagaagaaaaagctgatgatgttgatatcctccactgacaaaaagatcatatctctgcatgattggatgcttggaaggggtgactctgatttgtgttatgtcaaaccgaaagaccgaacgatgtttgatgatcgcggtcaaacattgactaatttttctcctatcaccgttattgatatgtgggaactacttgagattgtaggaagggatatacctgttgacggggttgaactgatcaaatatcttaacgagattggacacaatttagatattatccataaggcaacgaaatgaaagtagaaaaacgcgacggtaaaaacgtcgatttcgataaagaaaaaattcgcaacgctgtgtataaagctggcgggactatgacggatgctgatgccgcaatcatgctggttcagtacaatcagatccgcgatggtagcgcaatgaagatcgcccgtatccaggaactcgttgaagaatccctgatgaaaacgaacccagcggtcgcccgtgcatacatcgagtatcgccacgatcgcgatattgcccgtgaacagaaaagtaaactgttcaaagatatctccggcatggtgaatctgtccaacaaagagatcaccaacgagaacgcgaacaaagacgcaagagtattcccgacacagcgcgatttgctggcgggtatcgtagcgaagcatttcgcccgtaatcatatccttccgaaacatatcgtagaagcgcatgactccggcgacatccactatcacgatctggactatagcccgttcaccccttacactaactgttgtctggttgacctgaaaggtatgcttgagaacggtttcaaaatgggtaacgcggacatcgaacctcctaaatctatcggtgttgctaccgctctcatggcgcagatcaccgcacagattgcttctcaccagtacggcgggacaacctttgcaaacgtggataaggtgctggctccatatgctcgcatgacgtatgaaaaacacgaaaaagaagcaaggaaatacggtatttctggcgatcgtacatacgcgatggaaaagactgaaaaagacgtgtatgacgcgttccagtcctacgaatatgaagtgaataccctgcatactgccaacgggcaaacaccattcgttaccatcacgtttggtacgggtacgggcatgtttgaacgtatgatccagaaagcaattctgaaaaaccgtattcgcggtctgggtaaagagggtatcactccggtattccctaaactggttatgttcatggaaaaaggaatcaaccttgatccagaggatcgcaactatgacatcaaacaacttgccctggaatgtgcttcgaaacgcatgtacccagatatcattagttcagctaacaaccgtgctattactggttctagcgttcctgtatctcctatgggttgtcgcagtttccttagcgtgtggcatgatgataacggtaatgaaattcttgatggacgtaataacctgggcgttgtgacaatcaaccttcctcgtattgcgattgaagccgaagcacaggaagatgaagacgcgcatgatgcattttggcgtatccttgatgaacgtctggaactgtgctttgaagccctgatgactcgtatcgatagcctacgcggtgttaaagccagtgtagccccgatcctttatacagaaggtgcgtttggtgtaaggttgaaacccgatgatgaaattctggaactgttcaaaaatgggcgtagttctatcagtctgggatacatcggattgcatgaaaccctgatgcttttcggatctggacagcacccattcgaccggatcggttctcagaacatgggtagactgatcctggaatatctacgcgctgcgaccgaagcatggaaaaagaaaaccggatttgggtttagtctgtattcaacccctgctgaatctctatgtcatcgtttctgcaaactggactatgagaaattcggaagtatcaaagggatcacagataaaggctggtacactaacagttttcatctggacgttgaccgcaaggtaacgccgttcgagaaaatcgactatgaagccgattatcattacattgcaactgctggacatatcagctatgtagaattccctgatatgaaaaacaacctggaagcccttgaaaaagtctgggattatgcaatggataaactggactacttcggaactaaccttccagtcgataaatgttttgaatgtggctcggatgatgaatttaagccaacagaagacggttttcattgtacccattgtgggaaccatgatccggaaaaaatgagcgtcacgcgccgtacatgcggttatcttggtgcggtagatcgcccgatgaatgcagggaaacaaaaagaaattattcatcgtgtaaaacataactaagaacacctagtattagcgccttcaataaataaagaaaaattgagggcgctaatatgttttacacaatctacaaaataaccaacactatcaatgggcgtgaatatatcggcgctcataaaactgataatctcgatgatcgatacatgggttctggaaagaacatcaaacatgctattgatttctatggcattgaatctttcgtaaaggaaatattgtatgtttttgatacggaagaggaaatgtatctaaaagaagctgaactcgtaacagacgagtatatttcgcttcctcacacatacaacatcaaacccggtggtaaaggcggaacggcctacgaacaaagcgaagaacatcgacgcaaaaacagtaatgcgctaaaaggaagagaaatcactccattacatcgcgatcggatctcccgtgcattgaaaaatcatgtccgtagtgaagaacatcaacggaaactgagtgaagcatcaaagattgctgttagtacacccgaacataaagaaaagatgtctgctcattttacagaactgtataaatctcgtcctgaattgaaacagcaaatatcatcttctgtcaaagcacattatgctaatgaaacagaagaagagaaaaatcaacgtcgattgcgtcatacagggaaggttcggtcggaagaaaccaaacaaaaactatccattgctcataaaggaaaacatacaggagagaaaaatcctatgttcggcaaacctgcatcgaatcgccgtatggtttctggtgatggtgttgtgtatggttccgtcaaagaagctgcggaaacactggggttgtcgcaaggaacaatcgttgctcgatgcaaatcacagaaaaatgtaaattggttctatgtaggtgttgacttgccgaatcaaatcgattagtattttctacatcgaagcaaatcaatttgaaatcccagtggtaagcgagtgaatgggatagattacattgttcttgattcgattcgggatgatatacgataatttaactttgaggcaatattatgattttcaacaaaacaaattcacgtaatttgaactatctacgctgtgaactggaagctaacgaaattgaactgtttttctgtggggctacagatccggaacacaaattgcattgggtatccggtgagattgtaagcctaaccgatcagattgtcgaagaggctacccgccgcgatgcaatcgttaaaattggtgctgttgatgtgaactacgaaggacatccttcatttttcattcaatattatccataaaagtattgacctgtatatctgaatgtagtaacatccttcttgtcaactaaggaggatgttatgaaaatcaaaaacactgctactgaaactctttgcaacgaaattgcagaaatgtactggagtaaaggtcacttagaggctatgaaagagtttcaaaagtggtgtgatacccaaaagttagctaaatgggaatacatcgttattgttgaacggatcaaagaactgatcctcgtgaagaaaggttcattcttgctgtcgcggtgaaataaaaagttataaaggctatacatggagatttgaatgaattatattagaatttataatatggatgtggtcaacggaaaagggatccgtgttgttttgtttgtggccgggtgcaatcataagtgtgatgggtgctataatcgcagttcatggaacccttgcaacggaacaccgtacacggaagagacagaaaaccatctgatttctctgttgagtaatccgcatgttgatggacttacattaactggcggcgatccgctttaccgtgacaactatcctactatcctaaaactgcttgagcgcgtttctaaggaacttccaaagaaaaacgtatggttatggacaggatataccctggaggctttacaggccgacccagaacgttctaagctacttccttacattgatgttctgattgatggtaagtatgaaaaagatttaccaactaaaaaaccgtttcgcggttcagataatcaacgtatgatcgaattcgctaaaaattcgatagaaattaaaaatattgcttgacctaatgtgtaactatggtaatcttaccacatcgtaaatgacgattaactttaattgagagataatatcatgatcctgaatttcaaaacccgtaaagaagcgcgtaactactgctggaagtggaacattcccctgaaaaccatccgtaatacagggcgcggttcttgtccgtggacagttcaagcaaatgaactgaaaacgttcgtggttggtaaaacttacaaactggttgaccgtgaagggtttactaccaattcacacggtggatctaacaccgcaaacactatccaggcgacacagatcgaaaaattcctgaataacgaggtaaaaattatctcgaaaaccaatttagatactttcaaaattgagcatactccggaaatgacttttagctctctgcgttcgtgggaagctcgttatttcgtcgaagttggcgcggctccggttaagaaaacgaaagctaaaccgaaaaaagccaacgttacggctccggttgcgcctgttgcaccagcaaccgcagatcttgatcaaatgcttgatggcggttcggcaatgtcggttgaactggatccgactaaatttgttgaaggccgttcgtatgttctggttaaaccgcagcaatttaaaaatcgttgtggcgctaaccacgggatcaaatcatataccgatgaacacagtaatggtgtatacaccgtttaccatacgacttcgctcggtcatcatcaattgagcaaaacggtagaaaccattgattcccagaccggaaaagttggttactatctgcttgattctgaacgttcgttcttccgtgaactggcgacaggaattgttgatgaacctgttagcgtttccggtaatagcgctatcgctatcaatgtagacgaagcggctaagaaagaagaaatcgcaaaagcaatggtacagcttgaagaagcggttaaagcccatgaggacgcgcttcaaaatctgcgtactgcttccgacctggttcgcaaagctgctcgaaaagtagcagaagtaagcaagtaaattaaactgggtgctccggcacccttttttatgaggtgacacatggaattattagaaggtaaatcttataccctgaacatcgacgctaaagaatttgcagaaaaaacctggcgaaatgctttagctgaattgatcaaaaacaacggctatattacaatcgatcgtattgcgattggggatactgaggacattgcttatgttctgcaagatgatttcgaatatgagatccctagccatatctggaaatacttcaaaccatatgatttaccggaagaagaaccgaagattgctactaaagaagaaatcgccgcgcctgatttaaatttcgtatcttccgatcctaaaatgtggatgactgtaaaacctgttcaacaagatatcaatgatctgcgatttgattatccttttgtcaagcggatcacttcgatttctgtactaccagcgccgactgattcacaggcacttgaatttgcattacagcatgttttcggtgataataagctgtacgcgattgacaaggaagctgctattgatgaacagaaaaaggaaatcatcaaccttctttctctgcatcaacaacttgaagcggtggaattgattgagcgtatgctttctgatacaaagaaagatatcattagcaaaatcactccggcacgaaggaaagcaattgatgaaaatcgagatttacggtattcccgaatcgcttcataaatgttatggttgtattgaagctcggaaattacttgatgagcatggattagaatacgaattttattctgttctaaagccagcaaataacagtgtggggtttgattacgatcggccccgcattgaagagttagcgaaacgtgttcgtagtcgaagcatggcatttacttaccctcggatctttgtagatggtaattttattggtggttatatgcaattgaaagagtatttgggtgaagcatgaataaagaatacattcgcaaagtagcaaacgctattcacgcaacaacgattgattttctggaagggtttgatcatattatccaccctgaaacgctggatagttgggaagccaaactgtttaaaagtatcaatgaacagtttccggaaaaggttaagcgctggtttatcagacaggaaatcgtagcaacgatccttaatgaacgtggtgttgaggcgttcggtgtaacccctctatataagcgaaaccagattacagacgaaacaatcaagaaatataaaaagatggttcggaagtaataaataatcagttaaatggccttcgggccattttttgtatataaatattggtattgaatacaatataggaaaaaagataatggtagctaaatcattccgcgcacgaagtggccttgatgctgctggtgaaaaagttatcaacgttgggaaggctgatcgtaatacgctgagtgacggcgttaacgttgactttttcaatgaatttaacggaatccagcagtatgacccgacccgtggctattctcaagacatggcgatcatttatgcgcgtcgtatctggtacgcaaaacagaatattgcttcccctgctggggctttcgacgaatccaaatggatcgcaattcgtaatgacccgaaatgggtttatagtaacgtaaccactccagacggtagcattattgaatctggtagttacattatggctgatggacgctttactgaacttctgtacctgctgccggacaacccgacagagggcgacgtaatcacgtttaaagattgcggtggtttagtaggtgtgaacagtatccttgttaagtctaacacccgtcagatccgtttacgtactgtacaatcggcacagtatcgactgacccacccgtacatgatcgcaacgtttatctataacggtaacgtatggcgtgttgctgaaactctggataaccgcgattctgagatcgtgaacgcaaccggaacaggttcattccagttacaatctggtatgacagttttccgtaacagtgctacgggtaaaatcactctccagttgccgaaatatgcaaatgatggtgatgtgatcacaacctatgacgctgataaaatgaactctatcaacgtagccgttttgcagatttatccaggtagtggacacactatttctgacggtgcaattactggtgttacttcggtaactagccagaaatctggctttggtatgttcatctttgatgcacagaatagccaatggaaagtatatgatgctgataatcgtgttcgtctgcgtcgtatctatagtgatttaaacacagttcctaacgattacgtttttgttactgcaaacccttctgggactataccaaacgttacagttacccttccaactgatgttgctgatggtgatcgcgtttacgtatccctttatatgatgggtaaaaaccagaactgtacaatcaaagttaaagatggtacaacggacaagatccgcaccaacaaaaatatgatgcagttcccgcagcgcaaagactatccgcctgatgattggtttagtgtaacttcattagcatttaatgctgctagtgattacctcccgtatatcgagttttcttacatgaaagctacgaaagaatgggttgttgctaattatcgtccgatcgttgaacgtgttgacgcaactaacagatcgcgtactggtgttattgctctggctgcacaggcagaagtaaacaaaaacttggaagacaacccgaacgacgaaactgctattactccaatgacgttagcaaataaaactgctacagaaacccgtcgtggtattgcacggttagcaacaactgctgaggttaacaaactttcaaccgatacctatctggatgatgtgattgttacccctaagaagctgaacgaaagaacagcaactgaaacccgtcgtggattggcagaaatcgcaactcaggcagaaacaaacggaagcaccgatgatattacgattgtaaccccgaaaaagttgcataaccgtattgcatcgccgaccttaactggtatacttgcccttgttgctacaggtggtgctcctaacaccaacacggatcgtgctcaggctggtactggggtttatgatcattcagattatcagaaagcggtaacgcctaaaactcttcgtgagtataaagcgactcagttacaatctggtgctgtatggctggcttctgaaaccgaagttattaatggtactgttgcaagtgcaaacattccgaccgtagttactccggaaatgctgcacaagaaaacctctactgatggtcgtattggtttgatcgagattgcaactcaggcagaaacaaacgctggtactgattacacgcgagcggtaacgcctaaaacgcttaacgatcgtgctgcaacggaaacgctgacaggtatcattgcaattgcaaccactgccgaagtatcagcaggtactgtaacggataaagcgatcgtaccgtctaaactgaaaggttatctggacgatacaagccatattactgttgctactgctgacgggttaactcaatctgggactatttggactacggttaacatcggtattcaatcagcaactgaaacacaacgtggtactttacgcgtcgctacgcagtccgagacgaacgcagggacattagatacagtatttgtcacccctaagaagttacacgctaagaaagcgactgagagcgcagaaggtatcattcaggtggctacggctgctgaaactaccgctggcaccgttgcaaacaaggctgtttctcctaagaacttgaaaaatacaattcaggttgatacttcatggcaagctaccgatctggtacgcggtactgtgaaactgtctaaggggcttggtacttggtctggtaatgatgtggctggttctactcttccggatgatggttatgccgctgtaggtgttgctgtttctccttatgaattgaacctgacgctgaaacattatctgccgatcggggctaaagcggttgatgctgataagctggataacctggattcttcccagttcattcgtcgtgatgttgatcagacggtcaacggggcgttgactctaacgagaacaaccactgtacaggccaacattgattcaagcgctgatgcaacattccgcgtaatgaatgttaatggagatctgaacgttggtgatggttcgtcaatgggtaaacttcgtttgaatggtggttcatctaacgactggtcaattcaagcaagtttagcctctgggcgtattgcaatgatctcaacgggtaacactagcacagttcatctttctgtgtataatgatactcgtggcgttgtagctaacgttaaattccaggctcctgaaattcaggcgattagcaaagtgactctgggtaatgataccgtgatcactgctgctggttctgttctatctatgggtacgaacaacaagacaactaagatcctgacctctgatgctggcaacatagtagcggaagaatcagcaaactcttataaagtatttactgagaagaacgcgcaaaccttgcttaaccctacgtatgtacgcaaagcaggtgatacgatgtctggacggttgacagtaaacaacagttcaattatcatcgcaggtcaagcggcttggtcaacactggatgcagtaacagaagcatctaggggtaactggacggctgaaatcacagcatcggaacagtacaacttacttcctggttacgcggttccggttcttgaaccagacccgattaatccggatatcatgattgtaacccgttatacctatgttaaagcacctggtactttaacgcagtttggtaacggaaccgcattcacttatcagatttgggcacctcgtccgacctctggtactggtgttaatgcgctggcgcaatccttctggatccgtcaaatgaacccaattacgggtaaatttgatggttggggccgcatgtatactagcaacaacccgcctactgctggtgagattggtgcaacgtctgctgttggtactacggttaaaaacatgactgttaccgattggatcaaagttggtaacgttaagatttacccagatccggttactcagacagttaaatttgagtgggtggcataatgtcaaacttaatggcggggttcggccccgattttgtagaaacgcaaattctatcggaaacaaacagcgtaacttacagaataaccgcaaaggcaacacatcccaatgcggttcctaatcagtatgagtttacactaaatcaaaaggcggtagggacaccgcctagtgttgggatcaacgtatggagaattaacaatgctatagttgatccaattaaaaccttcacattatcgaatgataattcagcaactgcaaacaaagcgtttgttgaatatatggatgctcaaacttctgggctgtatttgataatgactaacggtgaatacaaaacaagccaaatcgttgatgattggtttgctaaaaacagatccgttatgtggcaaggcgctgatttcgctcagagattcccaaattctgcatatgttgcattgtatggggcatcaaaatctcgtatactgattgaatcgttttacgctaacgatggaattttaaaagaagattcacgcgcatcaatcgatcttgtctatgataacgttggtgatgttgggcgaactggtgtacctttcaggtctgttgaagatacggaagaatacaattcaaccaatggatctgaatataaagtatatcctgttgcaaacccagtgatctctaaactagctgattacggtatggctcctggattggctatgatgattactggtgatttttacgccagtaaagcattattggatgctggatcaacaacaagggttactgttcgatggtttacgggtactgctcaaacttcatcatcggtgattgaagttcctgcaaataaacctgatgagtggttacgatttgaacagttctatacgatccctagtggttgtgatggatttaacgttgctgtatctcgttatcctaaacccgctacggatagtttatctgcgatccgtaacttcgtgatggttcaggtatctgctgccgaagctgatcaaaactttgctgcacagtttggggttaacggtatcagaatgaacaacatgatcgatggtggaacaccgtatatatttgaattgccgaatactaaggtttatcctggtggcgattattctgtttccgaattccgtgaagttgatgcataaacaaaggcccggatcatagggccttataaatatgtaaaaaggggttattatggcagatttaaaagctggttctacagtcgggggtttacctatttggcactccggcacatttccgctggttccggttggtaatactctaacctatcgcggatataaggtttatactgaaaacgataaaccgcaagcatcaaataacgacttcgtttctaaagcaagcggtggtcaatatttgggtgtagttgcctttaaacaggggctacaaattaacgctactttcgcaggcggaagtgaccagaacggtttatattctggtgatggtgatggtgcgacatttgataaggccaacattgatcttgtatcatggtatggtattggtattcgttcatcttccggaacaagtggtcgcgtattagttatcaatgctagaaatggtgatgtaaacacgaagggtaatattacggttgaaaaacaaatcagtattacaaccactaaccctactgacgcaagtcatgcaacacgaaaaagttatgttgatggacagataaataatgtcacaacaaatgctaatagcagggtattacgcgctggcgatacaatgacagggctgttaactgccccgcaattcgcgagcacaggcgcggcttcccgtcccgaacacgtaccacggctcgaccaggtaattactaaagggactatcatagattttggatcttattaaggtgaaacatggctgatttagcaaaaattcaattcctacgtagcacagttgcggggaaaacacctactacaagtcagcttgcagatggtgaactggcgatcaacatggctgattatgccatttatacgaaaaatgattcttcgatcgttcagttagcgggtaaaggtatcccagaaacaaataccaaaaaattaacagttgatgggcctagtgctcttaatgataccgttaccgtagcggaaggtaaagctattactttcaccaacgagaatttaagtggtgaaataactcgtcatatcgtcggtaaatgtgccagcaatgatggatggtacatcggttccggtggtacaagcaataacggcattcttgaaatcggtactattgacgatggtactgaaacaatccagtttgtacaacgcggtacgggcaacgttgaagcccgaaaattggtcttgcttgacggctcgggtaatactactcttcctggtgagttaagattaactactaataagactgttaaaattaacaatggaagcacacttgtccttgaaatgggcgtaggctctaacgatgtctatattaaaaaccaacgaggcgtaggtgttcttcaattaactaatgacagcaatctggcattcagaaattctcaggtttattacgccatgaacggaagaggtcctggtaaatctggtactcttctgacgaatgtagaaaacaatcgtcaagcctggcaatataccatttctgctgcaactgcgtcaactccacgttgggtaaaagtagctacaataaagcatccaggaatgggttcttcgcaactggatttaatgattagcggtggtattgattctgggcacggtagacattacgttgattttatcacgttatcaggacgaaatttaacatcatggagcaccaacagtttagataagtgggttgaatggcgccgggttgggtctccttctaaaacgaacgttccagagtattacgttgttaaaaacgattctgctactgatgcggatgcgtcatttgatttttatgctaagattcctcgttatggcaatgacctttatgttacagtgctaaacacagctggatacaacggccaagattcaggtacagtaattatctatgaaaccaatcaagatactggtgctactacaccgtctggaagtattcttgtttcaatgaaacagatttttgatagtttagcaaaaccagatttcggtgataccacaggtactcttccggttaaccgtggtggtacaggtgctactaatgttggtgatgctagaaataacttaggtcttggtactgcggccgttcgtgatgtcggtgaaggtgctggtaatgttttagaaaatggcgcttatggcttaggcggtaatggtggtaaatccatcaacgacattatctctaatgcggatatgttgacccgcttaaaatcatacggtggtactttctggcgtggtgttactaaatctggcgttagtgttcaaaacggcctttatagccacggctccggtatttttatgaatgctggtgataccatgtcagccattaatatcgactacgatagtgctaaagttcgtgtatacgcagctaacgacagtggtcttgctacaggaaatgttaagtacaatgaactttacggcacagcaaacaagccgacaaaggacgacgtagggcttggtaatctgacaaacgacactcaggttaaaaaagctggcgacaccatgactggtgatttaactgttcctaatttacatgcttccggtacggggactgcatcggtatatgttaatgccggaaccggaaatgctcatgtatggtttagaacagacagtaatgaacgtggtgtaatttgggcaactccaaatacagcggacttaggacaaattaatattcgcgcaagaaccactggaggcacttctgctggtgattttagcttccgttctgatggccgccttgatgttcctgtagcagttaaagttggtggagcagcaatgctaaccaaagacgggaatattacctctggctcgatgtttggtggcaaccttaataactatctgaacaccattaaaaatgatatcactgctggcgatagtaagcaagtaagcaagactggcgacaccatgaccggtaacttgactattaacgctaacttaaaagttgaaaatcctagtggaacgtttgttgatttaggttcagagaactcggacaagtacagtagattaacccttgctcgtaaagttggtagcggtgctaccgtagcaatgcttaaaattactcctgaaggatacgtgcaatttggttatcaaactgcggtttctaatccagctcctagtaaatatattctagttaaatctagcggccttgaggtagaaggggacttggtttttaaccagacatatcgtggtgctgaagacgcagttgatattactgataagactaatgaccttaacaacatggttattaaaggcagtgatttaggtactcgtctattatacaagtgtacttctactggtggtggttctaatatatcgaacaaacctacctctgacggcaactttgttcttgaagttctatctttgcgtaaaatttctgataccgattggacatgtaagcagacctttactacaaagaacggtgatgttgaaggcacatatgttcgatactgccaaaacggtacatggtctgcatggaaagaggttgttgctggtgttcaaccaattaatttaggtggtactggagcaacttctgtagctgctgctcgtaataacctcggtgttggtgaaggacagagcgttaagttcggcggattagttgttgatggaaacatcaacgttgcttctggtaattttgttattgcaggccaagctcctactgataactcgcatctgaccaacaaaaaatacgttgatgatcgggttgcttctgccattagtaatgcgggtgatacttatcttccgttagcaggtggtactgtaactgggcggttaacaattacaggcgatcagttaaaaactacatcgctttgggttacgggagacgctgctgttaatggtgttttaactgttgatggaagggctagatttaatcaagagttcattgtatcaacttcggttaacgtccagaacactggtaacagtcatttggtcttccgtaaagctgatggtacagaaaaaggacttatttgggctgatgaacctggtaacgttagtataagagcaggtggtgtctctgggccaacgtggaacttctggaacagcggttcttgccaattcccaggtgctattagtaactttaacggaattaatagtactactaactacactggtggcggtagtggggcttatttaaacacggctgggttaacaagcagatttagcaatggtgcttatgtttccttatacttccaagaatatgtaggaaattatcaccaggctattcttaatgttaacggctatggtcgagatgacaatttctatttcagagctggaggtgacttcttctgtactcgtaatggttcatttgataacgttgagattcgttctgaccgtagagccaaatcggatatcaaagttattgaaaatgctttggaaaaagtagaaaaactaaccggtaatacttatgagcttcacaacacatccggtggtactactcgttctgcgggtttaatcgcgcaggaagttcaagaagttcttccggaagcagttactcaggatattgaagcagacgggggtttattgcgtctgaattacaactcagtaattgcacttctcgttgaatctgttaaagagctttctgccgaagttaaaaatcttaaagcagaaattgaagaacttaaatctaaataatgcatggggcttcggccccatcttttaggagaaataactatggcagtaacagggccgtgggtcggaagttcagcaaaggctgaaactggtgagtcgtggatggctcaagctggagcaaaattaagattaggaacacctttctggatgtctaatatgataggacgaagtgtttttaactttagtttaacagtgcaatatcgtaactggaacaatatttactatagaggttcatggcaagttggtggttggaactggagtcctaaaccgacaacacaaaatactgtgcaaggaaacttcgaaggtaaagaagttactttatttgtgtctgtatccggacaaggcggggttaactattggaatggtgaccctcaaggtacaactttaggaataagaaatggggacgctataaatcttcgagtaatgatgtcagatggaactacatttgattttaatccaggaaaaatggatggagatgtaagaaactatcaaattgtttcaaatgatgaagctaataagcttaaagattggtttagtaatagaactgaccagtactgggaaggccttataactagaagataacaataaatagctatgtaaggagagcaatatgatgtttatttcagtggaactactatgattgacggttggagaagatatagatgcgaaaacgctgatggcctcaatggatattttgaagctagaatgaataatcagtttggtgctttattagaatacgtttgatagataaaccaacaaactcacactattaaatagattaaaaggctaccatataggtagcctttttgttgcatcctaaatatacctatagtaaactaagaagagtcttataaaatggctgagagaaatcccgtagataaactagccttatttgatcgggtaatatcgtttgtgatgggtgtgaaaacatggaaacaattgctgataaaaataattctaataatggttatgtttcttatggtagtaacttggtataaatggactgatatattcccgatgataaaaggtgcccttgtagtcgatacaagggctatcgaaattgaaagaacagaaaagtttaatcaatccgcgttggaacagttgagcatagttcatcttacttccaacgcggatttttcggcggtactggcattcagaccaaagaacataaactattttgttgacattgtagaatatcagggaaaattaccatcccagatcgatcctaaaaacctcggcggttatccgatcgataaaacatccgaagaatacacgaatcatataaatggcttgtattattcatccactaaagcaagttcctacctaccgacacgtgattttgtgccagtagcttatacttttagttgcccttatttcaatcttgataactactattctggatcggttttgatggaatggtatgcaaagcggcctgatataccagatatgaagataaacatcatatgtggacaggccgcgcgcattttaggtcgagcgaggtgattaacgtaatgctggtgttaaattgtgtgatcttccaatagcccgtttgattgctttaaagaagttcatcaccgggctatttttctcgtaaatatcccaaactttcaatttgtcccacggatccggaacataatcttcattccttgccgaaacccccaacgtaacccgcctgtatccagcgctgtcgtgataatacacgaagaatggcctacctattggcgcaaccttacaacctctcttagcggctctcatagcctcatcgaacgtcatggattcccccaaaaatttctatgcatgaatggtcgaattccgatagtttcactcaaaatgaatatcggatgatctagctcatcgtggttttcttcgtcaatgacgatatcccaatcagtagccttttgttcttctaccgtggcaatgaatacctggtttacttcacacttgcggtgtgtacgtctgatgattgtatccccttcacgaaacacaatcatatcaggattggtagtacggtacgcggttttacccgcgcacacttcattaagcatatcttcgtatgtcattataaaacctttacacgttgaacgatggtttgtttaacgtctttgtattctccgtgctctttaacggttgctttgaacgtgatttcatcaccttcgtttgcaatgttattaccgaagtaaacaacaacattaccatcaacattaattttggtcatgaatctttctacagaagtgtagtaagaaacttgagtatatcccagtgaaatcactttctcaacggttccggtcatttccagacgttgtttgatttcaccgatgtggttagctttagaaatgcgttcctggcgctcttgttcccactgttcgcggatttcttcgcgtttggcgatataatccttctccagtgcaacacccatgcagtaagcgcacacggcgtcaaatacaggtctgtttttgttgtcttctttagactggtcagcccaccaaagaacagtaaacattggcatttctgcaattacttcgcctttacgcttgccaatcggcatgatccctttttccagcagttccagtttttcagtatcgaacactgacagtttaccgcgacgttcgaacagatcgaaatctgcaaagccctggaataccattttgaaagtatcagtttcagttaaacgggctgaaacacggtcgaaatactcacgcgctttcgcttccgctttctccggatcggtagataagttgcagatatagttatcagaagtataaccgccacctctacgctcaacacgcaaggtgtatattgcatttttacgaccagaagaaatgaagtaagtggtagtaactacggttgcgttagtcatggtatttctccttaaagggtatctcgtttcgatatggctaatatagcaaaagcccctgaccgaagtcaagggctttttcatcattcattcgaatctttcattgttttatgaagatgaatatcaaaaattttccagtacgcctttccgcgaggataaatttttgctttgtcaatatcgttgttgcttccccatgtgttgtttgggccacgacatcgattttttatataatctgtatgccagaataagcgctgaaccgatgattccgtacctaatggatcttctttactgaacagaatttgtatactcataagaagaacccagtgcgaacaatcagatcgattttattttctggttcaaacggtgatttgctatcgatgttacactgatagaacataccaacatacttttcaggaatgttggattcacgcgcccatttcaggttatcatcggtattcggccccatcatgaggttaacaacatcaacagcataatcctgttctttggtgttgccggaaccgtttacataatgcccgtgggcggttttgaggatctcaattacttcgctatcgtcagtttcgactttgtaaagcgttgtattttcaggaatttcttcaagaatgatcaaagcggttttcatcacacttacctttgtgtttctgtttacgttttgcttctttaaatgctcgcttgcgatcgcggtgagtagaagcgcggttgaaatcatgtttcgctaccaaattattcatataagccccttaaagaaaaatatttaggggctttcgcccctgtattaatccagcaatttgcggatcttgtctgcgatacgtccggcacgggttgcgctttcggtatgattgctttctttggtagccagttcagccagcttacgctgatgttcttcttctgctgcttggcgatctgctgcaacctgtgcaacctgctcattatcgtgagcaatacgcgcttccagttcagacagggttttgtcgaaagttgctacgatttcatctacagaacgaattttattaaacagtttcataatttatctcaattggttagttttaatcagtatacatcaatacggctggaattcaaaatcataaatgtcattcagtgcgcggttccactcggtgtagttttcaccagcaccataacgcatttgaatagcactttcgaacgttgatccgttgaggttcgggaaaccgaacaggtttttgattttgtcatgtgctacataatacagagaagcactttccagcatcgcaaccatcgcagacggttcgtgttcgcggcgcttgatacgtaacagagtacgactagcaccagttttacggcgttgatttggtgctacgtagaaacggaatactacgcgccctgttttatcatcaactaccaggtaaaacccgttttctttcagatccacgccttcgaatttcttgaaggttccgcgtttcatgtcaccaattttaattgcatatttgtgaatgtcaagtcttgtcagaattcttttcatattttttagataccagtttgcctaattttgtaatttcgcctgtttttacgttaacaaacaaggcgatgctcagaaatgggatgctaatcactacgctgatcaatgtaaacagaaaacgtatcacaaaaagaacagcacgttcaagatatcgttgcatccacgcgattcctaaacaactataccctactataaaggtggttgcaacataaaatgcaccaaatcctttacgaaatacgtaacctttcccggattctatccggtcgtcggcccacatttcacgggcagttttcagaatagattcaccactagcgcgagtttcgttagccgaaggcatgtttttaaatttcatgatagtctcctatgcgcccagaactctccaggcgcggttgtttag

SEQ ID NO: 49 - DNA, 176466 bp, unidentified
  source 1..176466: mol_type = genomic DNA
ttagtaatggctaaaaccataggtaacatcaatcatgactttataacggcatacacgcatttttgcgttattgtaatccactgggatcgctactacgtcagcaggatccaccttcacctgaatgactctaccaataccgcccccgtaatgtggaaggtatgatttagccgcaacgtgtaggccagtagaacaggtgcgcgttttatcttcgtctaccatgtttcgaggcatggagacagtcacaccaggactattatcaaatttgccagttgcgagatctttatagttatcgcgtacacgtttccaggcaagaaaacaaccatcatcggtcagttcaatgtcattatgtacaaggaacccgtaaagctggtataccgcatcgcgtgaagggtttcgcatcaaccgttcaaagaagtttaccagatgttcatacggacgatcgttatacatttcgcgaatgattcgttgagtgatatcagaatcaaacactacatctttatatagaagctgatgaccaatgattttaatgttgcctttgctataggttcggatcgcttcctgggtatccaaacaacgcaccgcgcctttaacatcaccagctttcagcatttcatgcgctttcttaaagttcggatgtgtttcacccgccatgaaaacgcgaccttcgtatacaaccgtaatgaacgattcagaaccgatcatacgcggtacagtgtctgatactttaggcttttgttttacgtcccttttcttcgggaactctgctaacttgcggttgataacgcgcccaatggttcgggcgcttacgttgaactgttgggccagtgctgttttacttgcccccgtcaaccatccattatagatagctttctgttgtacttcgtcaagaattttgaccattatttccaccgtattaatttcttaaactcactgagattcttttcgttgttgtaaaccggacgaatcgaataagaatcgctatgttcaacaagtgaagccagtaacgggtttagtgatttaaagatttcccatgcctgatcaacacgttttttcatattgctgcgtttaacgcacattgatgctacggattcacgcagaatcggacaacgcgccctggaaagatttttaccatctttctcatacccttccagacacactatacgttcgagcgtatcaacaaccttatacagtttttcattgtatcggtttttcacaatccgatcaagcgatacaccaaaacggctatgcaatgcgtctgtttctgttgagtgttctttaccaatccatccaggcaagcaattatctttcaatgccttttcggatttaacatactgcttgcacagcatatcatcaaagcataccagatttgaatctgggatccacttccataggctgttacggatagcaaacacaacagggatcccagtatggcgcatgatacgcgataaagtagattctttcattgctgaatccatagacaatctggagttttcaccatctaagcggctatattcatcaataccatacaaccgaacacctggggctttatccagtgataaaaactctgattttgtcataaacagagaagtttttgccagattgccgttactatccaactcataacgatatacggtcggggtttttgggcgcggttctgaatttttcggtgcatatagtgcttttgatttttcgcgatctgcatcatagatctctttttcttttgtcatttcactggtacggagatatacaatttccgattcatcaaaatgaccttttcgaacgatatcattaacaatctcgcgttttgaatcactatcgtaatacgcaacaaagctaacacggcttaggttatgcattttagcatacccgacgatatacggtttaaccgtgttggtatccacttttaacaaaatgagtttcttctgtttccacggataataaatgcgtgtgatgtcctggcgtttggttgtttctggcttatacttgctccagcggcctccgctaccagttacctgataccatgcatctttaccgtcgtattcgttagcccaatacccagcaacataatcatcattatatttgtttggtttgactagttcgctatggatccagccaatagaatcaccattgatacgaaaattagcatctttaccaacaaagttttgtaccattgaaggcagagaatggaaccacgtcagtttatcgcgaacggtttgtaacttatcgaattctgatttaactcgattgaaatatacccggctgatttgtttcagacgttctttaacaatccctactgtcattttatccatactcaactcttcgcgagaaggcatgaaatcaagttcaccgatcgggaagtcaataatatacgtatactggctttcggtatagcaatagaacatcgatgtatcatacaaatctttatccaggggataaatgatgttacccatgcgagcatatacaccgctagtgtatgctgatttgtgacggatcaccccgctatcattggttgcttctttcggctgatagttgattttgagaatagaagcaccaacaaagttaggacgaatatcagtaaatgattcgtatacccttgctgcttcgttttcccattctttgatatcttcaaccttgaccggaacggttatagtaaccccgttgggttcatcgctttcaatctcatacagaggatcgcagaacggttccccatcatccatatagattgtatagccgcatttgatgccgtcttttacagattcaactgtaaacgcatcggaatagcaaagtggagatttgcaacccagtcccatagaaccgatcaggtcgtttgaatcatttttagttgattcgaagtaaacggtaaacgcatcactaacaaaatccggagacataccgatcccgtagtcacgaataacaaaacgaggatcaacagcagttggcaactggacatcaaacgggttctgatttcccgcttctttgtgtccatcgatcgcattacaagacagttcgcgaatgattgcacggatcttgtatttgtatacggttgaagaaaggatcttatacgctttcttgtttgcacgtagagatagtttgtttcgtcccttgctggtatctgtaccaacacggtagatgatttgcggtgtatcttcgcgtaatttcattgtttatttctcacttaatattaaaaatgacttgatcacaagagtacttcgttggctttttgttcagaccatattctaccacttcgcaataagtgtcaaggaattttaccaatttttcttcttcaacttgctgtttcttcatatcaaggatacccatcacaatagcaatgataatagaacagaagaataaacagaccccaaatatggtcagatattttcccaaattaggcgcattataacgtgtcataccttacccctctttgcgaatgtatgcaagttcttcatgggttactggacggatatacagacggccttttgtgtatgccttgcgcccactgatccaaatgtttttcatatccttaacaccgttcatcacatcgttgtaaaacttcttatcagctttagcctgatagacttcgcggccttgataatctttcatgaacaaacaataaaggatctcattcttatcaactagattagcatcctttgtagttgttttacttggtgaaggtttcgcacccaggcgcaaggccatagcttgccacactttaccatgttcataaccgcgcccgacaagagcatgagcgatttcgtgtaaaagagtgtctaaaatatcctcgtagatatcttccgcaacatgacgaccagatagttcgatcagttttttggcataactgcaacggcccagagtttttgtaatgcgtccattgatccggaatgtccaaccattgctgatcaaaccgtgcttttccatcatggtacgcgcccagtgggttacttccattgcactacgagttttcaacattttagaatctcctttgcttggtacaaaatcaatatagcaaaaagccccctgcattgcaagaggctttgtaattatttcaacttcttcgaaagttcttttaaatcattgagatactcgattttcggggttgtttcttcccagtatttcaactgtttacgcaattcatcggcttcgtcttccagctttttgctttcatccgtggttagatggtagatgttcatagccactaacatttcggcatgattctcgcaaccttgccacgtagacacaaatttaaccgcttcgctgcgactaagaccacgcagagaatcaggagattctaccatttgagcaataaacgcaacctttgccagtgctttatctaatgcttccttagtctcctggatacgcttattgatgcgctgttgatatacattcatacgaatatcaacgaaatcctttagaagcgtttcagggcgttcatatgagtatagtttaccctcaaagataacgttaatgtttgggtttgagttttcaatcaacccgaaatctttcaggatcttttcacgggttaacccgttggcatactctcgtttgagagttatttcataacgaaaatcttctttcgatagatccttgtagctaacgataacgcctttttcttccagcttatcaaggattgcaatgtatttcacacggtcatatttcactgggatctcagtgatcaccaatttggttttaccttgcaattcataggtgccgtaaattgtaccgtctgtgatttcacctttaaagtaaggatatttcagatccagtgtgaaatctttatcattcagatatgcaatacacccgttaacaactgatttaggatcatgaggcgggatgtttgttgcatatgcttttgcaatcccgctaaacccgttaaccagtaccattgggatgatcgggagatagtacgctggcggtacatgttccggatcttcatgaactggagttaaatcaccatccatataaattgctttgaatattggcgatagtttacacttgatgtaacgaggtgcgccaggtttcttaaccaaacgggaaccaaagaacccatcacgatcgaataacggaatgttattgcaccagtgcgccgccataagggataacgcttcttctacagaggtttccccgtggtgatatccatacatagcaacaccgccagcgatagaagctactttctgaaatcccgttccgccctgcatagcagagtgaataaagaagcggtgaacgggtttaaacccgtctaccaggtgcgggatcgcacgtgaataaatcgtgtaaagggcaaacgttagcccttccacctgtacaacatctttaatacttctttccattagtcaaccttagaaaatttgtgttttccattaacccaatctttacgcggatcggattcgtcaccgaagcatagttctaacacttctttgtattcgtcgtcaagtacgataacatcatacttcaactgatcacccagaacacgatcgtaatcttctttgcgtaaagaacccagtcccttgatataccgtacatcttttgctttatctcgaaacggtgcaaactcatcaagagagtagaaccatttttcctcgcgcccaactttagcgataacgatcggggttcgaatatatcggatccgtttttctgcaaacagagaaggccaacggctaaagaatgcaagcaacagggttaaaatatcacctccgtcaacgtcagcatcgaccatgataccaatattatcataagtcattccggaagtatcaccaggatgaatattgaggatagccattaattcaaacagttctttgtttttgataatgtctgtgaaactcataccccatgtattcagaggtttaccacgtagcgggaaagcgccttgcgtttcttcgttacggcattcgatgaactgaccaacagcagaatcgccttctgtcagaaacaatgttgtttctatccctggagtatcaataccggaagccggaacgtgtttagcaatctttgcctttttcgctttctttttcgctttggtgatcgcggcggcttctgctgcttgtttacgaatcaacgcagattcaatgatcggagtaattatttctgaggtatccataatcatttttgcgatctttttgtaattcaaattcgcatgattgttaaactcacctgctgtatttgccaatcgctcttttgtttggctatcgaatgcaggtgcattaaagttatgcaggaataccacaagagttaagcattcttttacacgtgctttcgggatctcgatactatgctttttcttgatcataggttcaagttcagaatagataccatcgatcatacattcaacgtgtacaccgccgtttttcgtatccagaccgttaacaaaggatttctgtttaaacccgtcctcagtgctcgccagaatgaagctgaggcgattatttgtctggacaatggttttatccccatacatggaagcgtacagagggaagcgattagagagcgtttcgccgttatatgtgaatttcacagacgggaaagcaacggcaagggccattaagcgatccttaatcacttctttagtttcttcatcaataccagttacgccaaacatagagaagtctggagtaaacttaacagtagtaccctgttctttactggggctggttcggtaatcgatgttctgtgcgccgtctgtacagttaatggttactttgcgtttaccgtttgcagtctcaccaataaagatcgagctataacagtttgtcaggaaagaaccaacaccattcatccccatcgttacgcggtttttatcatcgaagttagaacccgatttcgccatagtccacgctgcaacaggtttaggaactattttcccgtctggagtttttacgtcatcctggggaataccgcgcccgttatcagagattttaaccaaattgtgatcaatggttacgtcaatcttattagcgtgtttgaactcggttctgatcgcctcatcaatcgagttatcaaggatttcgttgatgattttaaccaacccttccacgtactcaactttgcgatattggcccattatgaaacgttcatgcgcttctttgttaactgatccgacgtacatatttggacgcaaccgaatatggtcgcgatcgctcatacaaaatgattcgtcaacctttgcgccctttttggctggttgtggtttctgttctggttcatcatctgccagaagaaaatctaaactcatattcacctctttgtttaatcactgacattatatagggttctatgaaaaagaaaacccctttcggggtttacttgttgtaagggaaaccatcacgaaccatttgaggtttatcaaccgttctttttgcttcgcctccgcaatcacaatctttcggtgcatcacgggtagcaatgcttgccatttttggaaattctttattacacttggtgcatttataagtataggtaggcattaataaatctcttttaaacttaacatcttaactaaacgggctttgtctatgtcaaaaacacattgacgtgcgcccggatacaacttttcaacttcgtataccatgcagacgaaaccaacattgtgcatgtactcgcgttcatatgcattgaaccaacgagaaaggcgctgtattgactgaaaaccaaagtataacccagcctcttcaaagtctatattatctttttcaaggttgcgcatcaatcgattatcgtcatccggtgctggatgtcggttatcatccatatcaatatagatatcaggattcatacagaattgatccagccattcagcggtatccattgtcaaataacgattgacatatgggccgctttttgtttgccatttttctgtacaatcattccagaaagaacaagaaaactccacacgatatacgaacatgatataatcctcacaagtaaactcaaggtttacaagtacgataccacttatctaatttttctacaagcatttcgttgataatttttgcaatttcgtaccgtccgtgagtagtacctagttccaggtaaatcacatcaagtgcgcacacaatcgcatcaatactttcttcaacgatattaccgccgcgttgaggctgaatgagacattcgctgatctcaccgacttctgctgataggtgatgaaccacatcacttttcgtgcgtttcttcactttatgcgcggtttcgaaaaacttatcaagtacgatcgtcgtttcttctcgcgttgcggtattctcggatgttgaagccgtgtgttgaacaacatatttcgtaaaatagttttcaaacacgttgaaagggatcacatgaggaacaccattcaaaaacaccccttctttacaaacataatggatttggcgaggaatagacaaaccgccgctgcgttccaaatgccgtttaacgcttgctacaaaatcgaactcttttccatacccatctaatctactgttataagtgagtagaccaaatccaggaacatagagatcattttctttatacagattcatttacaatacctttatggtagccaaaaatataacaatcaattgaaggacgttcaccagggaagtgaatgcattgcatgactcgttcagccattagatcttctcccatgtataccgaagtagtttcttcgttgtaatgggtatcatacgacgttttaagcgtcatgcccggaagccctgcaatgtgcatgaatttagaattggtgcaaggttttcctacttcaccattaatcatcaacactgcattagttttacgtgcttttctcatttgaatttcaccccaatttgcgatacgttccattcttttacttcatcaacaatatcataatggttgatgtatggtaaagcaatttttaaattactcgcgtcttgaatgttgcgtaagaaacgagtaggagaaagaagacacaaccgctcggatccgttgtttcctttagcggcaaatgatagggtttctcccccgtcaatcttcatatcaacagaaatagttttgaattctggtgcatatgacgtgatttttccgttgtctctcggtgtactatagaaacatacactttgaggaacattatagcgatctgtttcaatgtacatataatcaccgtcagccactccccacacggtgtagagggatccggtatagtcaccaaaggaatttttaaaatcatcctttgtcgtatatcccagagagcgcaattgcataagttggttatgctgttcgatcgcgtcggctttttgttgttcttgtacttgcgcatcaatcgtttcttgccaggaattatacgcatagtaacccataacagcgattacagccataacccctacagctttccagattttagcgtcttcgtttttgttactcatgctgtattccttttaagaaaaagggccgaagcccctttattaacgaagataaaccacataaccgctttggtcgatagcacggtctgcgtcattgaagatattaccacgaattccttttgctggtgctttccagcttgcaggtttcaggatattaccatcattatcgatgaaggcggcaacagaacgctgattgaacatttcgcctgtttctttgttgcgagtatcctgaacaacgcgatgatatttgcggcctttctccagaacgaaaacagtttcgaaaggagaatcctggaaacgagcgttacgcgctttgtacattgcttccaggaaaggggctgctttttctgcgaggatttcgaaagtgttcatggtatatctcctaaagtgtgtttcgtttcgatgtaagtactatatcaaagatagttattctatgcaaggcttttttcgttatcaagcaaatattttaagtgttcttttaatgcaggaagttcgttaagatgaccttgtttaactttctcatactctttgcgttcccagttttcaagattgctcgccagcgcttcatcacaataagcgatcccgcgttctgcatcccgaactttctgtttccactgtgcaactgcttgttgataaagagaaccgttaaccatcataatcatttcctccctcgtttcgattgggtaactatatcaaagctaccccagaatgttttaacaaaaagtgctattagtaagtatccagtttatacattttgcaccagttcatgaattcttcgaaagtctgagtattaacacgtttttccttcttcactttcttagtgattaccggacggttagtaaaacgtttttgcattttcacagtgattgctactttatctcccagatcttcaaccttttcaaccagcgcccactgagaaccaatttcagcaccgaaagacaaaccaacaatctcacctgctttaacatttgctgcatattttactttaaccattttcgtattcctttctctgtttcgtttcgatgaatacaagataccaaaaagccccctgcattgcaagaggcttctttaacaaaaagtgctattttgttttatttagttctttgagtactttacggatcccgccgccctgtgtcttatcaaagattttctttgcttcaataacagacgtttctacatgataatcaattcctttagcagaaaattcaaattctatcttgtagtcactacgaaacttcacaaaaacgaattcacctgcaaagtgcttacgaaaccgtttttcgttgatgtctaaccattcctgagtatcagccaactgatacatacgaccgaacattattgaccccatgatcgcaatcactactaatattcctaacgcgaattctgacatcatttacccctgtttaccgattgacggtgcaacgatttagacacaaccggatttcggtatggtttgactttatggatcgttggttcttccccaaccaaattaggaaattggttgttccattccatagaaaatggataaggttgtgacttgaactcttcgatcatacagtttactaaacggtcgccaattacaccaaaagccgccccaataatcgctatacgcataaatcaccccttaattgtgtcaagtacagtaaaccagtcatgaagccatatcgttgttcttacagcgatatacgttaacaaactaatcaatgataccgctccgcaaatagccagcgtaatcaacatccgaatttcaaatttagtaaaattcatatcaatctcctttcttagaacccaatataacaaaagccctcaaccgaagtcaagggcttttgattaaatttttacaagttttggcaatcgcagaactataccaggatggatcagacgtgcatccggaatagtatcacggttgattttggcgatgtcgggccaacgttcaccaacaccatacagtttctttgatatggaatacaggctatcaccgggttgcacaacatagcgatcagattcaatcttaaccaaatcctgattaatgatatcatcaaaggcttttgcttttgcttctttaatcgtgttcccgtagtaaggacgatccatgacagttaatgtgatcatcgtttctttcctatgctgttttcgtctgtctcttctaaggatggaggttcttccagccccagagcataacgtttagcatagattagcatcaacgcatctttagcgcaatcatgaattgaatcatgctgaatgaatccatctaacatgcctttacgcagtggacacgtggttactccgcgagtcagtaaacggttttcaatggctgtacgcacatcacggctattccagaacacggtaggcatatcttcaaacgtgtcaagttttcctgtcatagttcgtacaacatcggttagcatagaacgatcgaattcagggccgcgcgtataatcgtatgactgccaacgactcacaccgtcagccgctaaatcagcaaagaattgtcgatgaccttcgtacaaatccatgtcaatatcggaagggaacaaaacccgttgcgcttctttagattgctgtttccaccattcgatcgttttttcatctttgatgcgttctggttgtttccggatgtcgaatttatactttcttcctttagcaatcagttcttgaaaggtaggcggatcataaggatcatcaacaaacggaacatagctaagttcggctagttttcctttcggaaacgggccaatactttcataatcaaatacgaaatctacgggtaaatgactcatccacggcccctcttatatgattccatgaagtaggctaatgatagcgcaacttccggagtaacatcaacggattcgatcatgcctggagttaccgccatcatcccgaactgacgaagcccacaacgagcaatcgatttttccagtcggatcatgttttctacagcctctgcaaaattgtccagatgttcccaatcgtggtaatcttccattgtagaacgatcacttttcaaaatcagatcggcaactaattcagcataaaggcgcggaaggtgaatattcatttaaaatccctcaagcatatttttgttttcacgaatgttacgacccattttcaaagtatcaatgatcactgcatactcttcaaaagtgaattcgatatcttgtgaaatgtttccccatgtgtaggtcggcccgttaggacagtataacccaacttctttgtttgcgttgacaacgcagcgcaattttgcaaacaacaaattgatatcgatagaattaaacccttcgagataatcaagcccctctctaccaatacggtcaacttctcgcaaaatcttttctacatctttgactttaacaataattttcataagaacctcaaagggccgaagcccttatacataatcaacagtgaatcgtgcgcgggtagttcctacataaagcaactgcttacacaattcataatcggcgtatgcgtatgcatcgcgcgtgtacatgtatgaatgatcatacgtgcttccctgacctttgtgatacgtacaaactggaagcgccttaaccgtctggaacttgtttttgatttgccagaacgaataccagggggctttgtatccggtttcctgtttcatcttcttatactgaaacgcgacgtagttcaaataatcgcctaaacgttcctgcataaccggatccgcgataacctgaatatccgctttcgtatcctcgaacatcgattctgttttcatcaagaaataatcgatttgcaccggatcgcatcggtcagctttgatagtatcagaacgcggtatgatttcaaggattttgatttgctcgttgttgttatagataacttcaacaaacgaaaccccattcacacggccttctgtcactaacggttcttgcatcacaaccacttcaccaacaatgaacggctgatcagttttgtacaagtgtttgcggatcactgcgtttaacttgtctacgtttgcgttagtgtaagcaaacatacggttattgttcaggtcatccggagtcttaacacggctaaaataacgtctcaggaagtcgccagcgttttcgtgcttcattacccctaattcaccattcatgaggggcattaacggcttaccgtcgcgtatagcgcgtgatacctggatgattgggtttccttctgcctgacgcataatcttatccatgcgaatgacatcaaaaatttcctcatcaaagaacggtgaaagctcggtgatcccttcggtattaaccggacggatctgatccttatcacctaatcccaggatcaccgcacaactcggaatagtacgcttgatgatccggaacagttctttgtcaaccatcgagacttcttcaaccacaaacacacgacattcagacaaatcagcggcttttttgcctttttgctgttcaaatactcgtaactcttcattggttacagggctgattttcagtgctgagtgaatggtcgttgcatccatacctaccgcctcagagagaacgtttttagcttggtgcgtcggcgctgtcaaccagatcccactaatacccagttttttcaatgtttcaaacacaaattttaccagagtagttttaccaacaccaggcccacctgtgatagtagtatggattttgtttctgatatttttaatcactcgatcatgtgcgtttttctggtcttcgctcagatcgtcaaaagttaattcgctcatactttaatcaataccccttgaatacttgcgtgttcaataaaccaacgcatatctttctttttcttttcggttacagtttcaacttcttcctttcgaaagaatcggctaagaccactttgtttaactggattcatcttatcattatattctttgataatcgaatttttatactcgttagcatcgcccggagatagaaacaacaaaggtgttaactctccttccttaatgaagggaattttaaacccgtctttatccttactaacgacgatataatattttgcaatcattttctcccctcataacaaacgtagaatatcccaacaaaccaaaacactgatagtataatcagtaaaagttttctttcaacaccgtttacgtgaaacacacaccaaccgaaaagatatgtgatcatcgcgcaaacaccataagaaagaatcccaacagctactagcgcgatgatcggatccattagtagttgttagcccaacggcggaggttttcggcttgtttcagtgcatacagtttgtagatggtttccgcatccatacccagcgccaggaatttgcacataaagaaatgccactgatcgataagttcaaacagaacttctaaacgatcctcttcactcagatccgtaaatttagtattgcgcaattcctggtgatttgctttccacggtttccaaacaccggatgcaggtttaacaccgcgagacattccgcccagagcggtatacaattcgcgggtttcgtcggcgatcgcatcgtcttgcagtttcagccaatcaaggatttctccgcaagtttccagattatccggacgtggaacccaatgcagggtatcagacaggctttgttgtgcatggttttgtaagtccagcatggattgtaaaggatcgccattacgggccagaaccttttgatattcggaatctacaaattccagatcttccggattaaccaggtgcgcacatgaattaaatacaggagttttatcagtagtcatatcaatctcattttttcggtgatttgtcccacgacttaaatctaagttttgccgtgagtccagaaacagtattatctttcaaatactgcataatttcaagtttagttgcgccgtccgtttttatcatttcgttgatatctttggaaggccacgggcatttatcccacattacaaccttttctccagcctcaatcaatttaaagaggcggtgagtagtatccggatgacgtgcttcattgtcaagaacccagacacgcatatttttatacggaacctcagaaagtgcaagctgtccaccagtgatagcgccagcattatcaacaaacaggctatctaatggcccctcaagaagataaaccgtttttagcggatctatcgtatcctgtccgtaaatcttggttgattcttcacaggctttgattgtgatatatttcgactttgccccgtcgcgtaaagcacggccctggaaagattcaattttccctttcttatcgaagatagggatcactaatctcggttctggttttgcgatcggataggtatccggattcaccgtattaaccagttgttgccattcgcgagtaaaccacaaccgatcccacttgtcacggggaatacaacgattctgcacatattttatgatcggatgttcatccggcaaggtatctaacctttcgcagaattgaagagtaggaataaatttcttctcttccttcggttgttctgtatgcgttggctttaacgaattgcgatccttaaacgattccatgagataatcacggtaatcgtctggataatattctttcaggaatacgctaaacggcacaccataaccacagttaaaacaaccacaattcatatgatcaccctttttagaagggtagatccaaaatcgttttttgtacttgtctttcattgagtcgccgcaaatagggcaacgcgcattgatgcttaatgcccctgatttacgaacgatttcgctttgaggcaatgatcccatgattcgggttgcaaattctatatcaagatacatttcttacctcagttgactatctttagatcctcgtcgattatacccggcgctgatcatttcgtcatgttctttttggcattcaatacaataacggcaacccttcacgatagccctacgtttttcaggtatcggatccccacaatcaaaacaatgcgttaatgattctccgtttctgatttgagaacgtgcaaaatctatcgcattgtctattgttgcctgaatggtatcttgaacaccgtcagcagggccaaatccaaccgccattgtaaatcctcctaatcaaatgattagaatatcatagactaagaggatttttctgtcaactgcttacttgcttttctgttccatcaagcattaacttccaaccacgaaatgcttgtttaaacgaataatttattgcaatatcacttctatcagaaccttttcgacgattctgataaacgatcgcgttgtcactcatatacatgatacaaattggaaaccatgtataatcgttagcagtagcccagatagtgatattcagcggaggaattatcatttctttttccttttccctgcacgggtaacgcctaatactttcggcccgatgttggttactgctccagtagtcacaccagaagcaatcttttctgtatcgccgccagaatcacccgcgaccatatcctctaacatgcgccccttatcataatattctttgaggcgtggaacgttcaacatgatttcttcatgctcttgttctgtcagattgtagcgattgcgtagggtatcatatgaactggttaagttcataaacccactcatatacggaacagcattcattctacgcttgatatggcgtactgaacgatgaaaaggagaatacgcttctaactcttcttttgttttggggttgcgaattacttcgccttgtccatcaaggatccccagcttgtaagcagaccactctgtgaatggttttttcagtaaacgaatcattcgcacactgtatgttaaatccatattacgaatcatttgatcactcatgatgatctcctttctaaattagtattacgttttatttgttctgttacaactgcttggtgtgcttcttcgggagtaggaaataatcccaaatttatctttttcccttcaactgtgattctgcctctccataacacaccttttgttttcgtttcatgtttggatacaccgatgtaaccgctagagttagtagatggtgcttttctgtttatcgcattcagagattgtgttagttctcttaaattactgataccgtcaccaaattcaaccccacgcacatgatctactatttcaggtagatatccatgaacatagtaaaatattagtctatgtcttctgtactgttcattgttaaattttataacgtgatacccctttgcattggggctaccagcaacatcaccaggctttatctttcgttggttagagttaggagttttccatagcacaattcccttttccgtattaatagacagattagggattaacagatctaatcctttcttttcttcgtcaagggttcgttttccactaccgtaacttttttgcatgattattactctattgtgaaagtgaataaatcagatttggtttcaggttcaaactccatacaaacaacctcgcatagtggtttaacccctttccaatcctccaggtaatacccagtatctataccgcatccaggattcataacaaggccagtttcatcaagaaactttttgcatttacttgatgtggtgctgtcatcttgtcggaaacaatgtgttttcgaataccggaaatttgcagacatttgagggattatgaaagttccctgacgcgctatctgtgatgcacgttcgattactttatactcaaattctgcccctgtatacttacccttaaaatcagaggttttgattttaccaaaaggcgggttactgatcgccatatcaaacacctgattaaattcagttgttaaggcgtctccatgcacccaggaggcttctggtacgatacgcttacccaactcatagtatgtgtgatttaactcaacacagacgatttcacgcggcgtattgtacatcatgtaatgaaccatagcgaaagataaaccaccgatacccgcacacaggtcaataacatttccccctgtgcaagcatcgattgtgaaatcgcgagcaagtccaataggggtaaagaacgcccctaattcagaattgtttgtaaacgcgccttcatgaaagttttcaataatgaacaacttctcttcgtaagttagcgccttgtcagagtgaaccagatccattatctgattgtgtttcttggtttccgctttcgttaactttgccattgtcccagctatacaataatgttgatttgtttggatagaattcccatccgtccacgtatccggtttcccaatcagtagtttgttcaaaaccacagatccattcatatacacccggaggcagttcgacggaatcaggaagcccgatatcttccgcgctgcgtccacattcaaagaatgaatcatggatgaatggtcgagataatactgtaacatagccttcatcgtcaacagctacgatccagcgcgaactatgaggactatcgaacttaggttcttcttcgtccggaatagactgcatttcaatgttactaaaatcaatgttcatttcaaaccctctttaacaccctctttcatcgctttccaggtagaacctgcttcaccattcagggcggcgaatacaaatagtaagatagcaaggacaagattcacgccagcaatcaccatgattttgctatacacaaaaatgtaaggcattgccaccacccaccaactaaaagaattaccagttacgatgttgagtgctgcaagtaagaaagtgataacgaatgcgattttcataatgtcctcctttgttatgattaaggtatcatcttttttgaaagaatgcaatacctatagatataaaaaagcccctttcggggcttaatttttatgcgttattgatgagataccgaagaacgtttttcgcttgttcctcattacaaccaactttgaaaccaggttcgatagggaggaagttccagaggaaatcaacacttccttcaacgtcatctttgcctttttccagcatcgctaacagcaaacctttgtttttgatactgtttacgattgcgtcaaaataaccatcactgaaatcaacattcgggttcagcatttcgttataagggttgttgaatacgttcattttgaatctcctttgtttaactcagtatcttgtctacgtgagttatattaccacaatggagattcaggtcaacacctttttacgatttttttgaaaagtttttcgtatttagcttttacccagcgatacatatcttcggccttgttactggcaagcagtgagaacagcagatagatcgcagcacccaccaacgcaacgcctacaacaaagtagacaggtagcagaactgggaagagaacccagaaccatgacatttgcgagaagccgaacactttagccgccgcaaaaatcagagtcagtccagttagcagtttgatagccggaatcggaatcgttatagtcttagtcatttcattaccttacattctttatggggctattcaccccagtcaattaaaattgaatgtcagattttgcaatctgtgccattttatcacgtcgggtagattcagcctgtttaatcatcgggccttgtgtctgttctactgttttaggcatagtgttgccgtggtagtcagatttaaacccgtattcgctgttgtctgtatccatccagcgctgattacccttgcgaacttccaacttgaacttgttgaaagtgttcttatcgccataacgggatttgatttgcttgaacagttgcataccctgatcagctaactcttccgtctcaatcacagccaacataaaatcagccgtagcaggtaaaccagcggattccgcaacatcacccatactcacatccgaactatcccatgcagaacgcccaacctgtgcgcctgtccacattacggtattagtttcaacagcaagaccgcgtagttcttcggcaattgctttaaccagaatataggtattttcagcacctttaacacgggttgaagtacagatccccaggtaatcgacaatgatcacatccggcacaaactgtttcttcaatttaagctctttcacaagcgctctaaagtggtttgcacctgcacccgatgtagggtactgcttgaccaccaaacgcccaaccttacccgctttaaggcgctccattttgttcttatagtctgcgtatgtaatgttcccttcgtcgatgtcatccatagtcacatcaagaaggttagcatcgatacgcttagagcaaacatgctctgccatttccatagaaatgtaaagaacgtttttaccctgttgcagataatcagccgcaagagaacataagcccagtgatttaccaacgttaacaccagccatgatgatattcagtgtaccacgttccgcgccgcctttggtgattgcgttcaggatcgggataccaaacggaattttcatcgccttcgattggtaaagcatccaccgtttttcataatcttcgaaatagtcatgacctactgaactatcgaatgaaattgctaatgcttcctccatgatttcagggatagccccaacaccaggaagtttcttgttctgttctgccagtggtttttctgcgttcgcctggatttcgattgcacgagaaagagcacgatacattgctttatctttgcaatatgtttccgtttccttcattaaccaatctaaatcttctggcgcatttttcagcgactgaatcgcctttttcgtgtcttcgtagactacatcacttagatttcgtttgtcaagcgcaacctctaaagcagtttttgacggaatgccgttgaattcctgtacatgtttatcaatgaggtcaaacaaaacttgtgcattgccttcgaaatattcctttttcagatggggccatgcttggacaaaatatgtcccgttataaatcaggttagaaaatattgtatcaacgatcattgtattgccttataccaggttgctgaacatcatgaaaaagttgtaaaccttttgtttgaatacatcccataatgtcagtttaggctttgggacaactgaacccttttcaagctctttaatctgtgcataaattgcatcatgcaccagcgggatcaacgcttctttgtcttcgtctggggtactgaattctactttcagcccatgatcccaaaacaccttatgaatataaaccagatgcgcaacacctttttcatcgttaatcagaagttcctgaataacatctttcatcgcttcatcaatataattctttgctttgctctcgatatccatacattgcctcggttatggggccgaagccccatagtttttataaaatttcgtcgttttcttcgatatcatcaaatgattctgggatatcgtcatcatccagatcaggatctgggatgctatcagtgctgtataaatcttccagcgcggaaccatcactgatttcacgatcagggatcttatacttttcttcgatagctttcaagaatggttgatgagtaaacagaggacgccagaattcaacgctatttgtttctgactcacgccatttcttttcttcaacttcgagttcgccagtctcggtattcaggaaagcgcggttgcgccagcctttggttacggtctgtacaaagttcatttccattgccagatccaaaaggccagaatacatactaataccgccttcataggtaacatgcagcgggaattttgatttctctttcacgaatcgagatttttcgatattcatgatgaaatcataacccaccacctcagtaccttctttcacctgttgtttacccaggatgatcgcagtatcagcggaatacattaaaccagtaccaccggaaataactttcttgctgtacatttcttgtgtgtcgtaggtatgacagatacaaaccatcgggatatccagatcagccagataaggcgtaaccatacggaacataccttttaatgcttttgctctcgtcatatcctgtttatcgttatcagaaagcgcatcagcgagttcttttttacttgccgtgttgcctactgagtcaacgaatacaatcaccttatcaccgcgttcaagcgcgttaagctggcttacaacgtcattacgcaactgctcgaccgtcgtgatacgagtatacacaacacgatccggatcaacacccattgatttcagataggatttagtaacacctttttctgaatcgtagaacaggcacacagcatcttcatacgtttttagatacgccgctacagtaagcaaacctaagttggatttgaagtgtttggacgggccagcgaaaagggtaagaccagaagttaggccaccgttaaacgcaccggacaacgccagattcagaatcggcacacgggttcgcgtgatggtaatattgttgaatacgtcgctttcagaaagtacagatgcagtttggctattcgagtttttgatcagtttttttagtagtgctttgtttgacatttaatttttccgatttattcattgtcattctatatatctcactagttaatgaaaggggccgaagcccctagagtttaccagtcaccgaacaggtcgtttaaactggcacgtttttcataatcaattttacatacttctgtgatgttagtcaatggactaacaacatgtttttcaaacatacccggataatctacccatgccaaaatatcactttcgatctctgctggtagtctatttccggattgccacgcgatgcaatcagcttgccacgggtttttatcccttagtggtagaaccattaccttttcaccttccatgattggtgtaacaccatcaataccagcagtgaaacggttaaagaacagcacccctttaatatggtttggtgttcccttgattggatatccagccccatcccgatatttcgaaatgttgttagcagatgatacaccagcaatttccctgtagtcaagtgccttatattcttcttcgaactttttataatgttcgtgcaaagataattcaccttcttgcaggatacggcggatcgcttctttcaggaatactttcacagaggtcggagtactagatcgctgtgtttccatacccatgattttcaatttcggtttttcatagcgggttccttcggagtcccacacgttagccgcatatcgttttttagcagtccagaaacttcccaacccttcggaacccaacggaggcccagaaatgatttcacgatccataaacatcaggtgttccacattgttcatgtattcgcaaagttcacgataccctttatcgatcattggttccattctttctttagcaaagcgatccaggaagtcaacccaatggttattatccttaaatttagcctcaccaccaacttttgcaatcacgttatccatgcaaacataaatggagtcagtatcacagtatcgaacatatgcatgatccgtagtaccacacaggtcattaagatattcgtttaccttacgttcaatccactggatagccaactgcccgaacatggtgatcgcgctggcgtttcgtagatcgaagtatcggaagtgttcattacccaacgcaccataaagggagttgatagaaatcttacggttaagctgtgccgtgttcgcttgtgcgatcttcttctcacacacgcgcttaactgctttaagcatttgttttgtaagagttttcagaactactttcgattcatcactgaaatctgtatagaaatcaaagtcaggatcaaccatttggttatgcgcgtctgttaaatgttcgagttcatgcttgatgagttcaagatttcgctcgcccgccatcattcgttttttccacatcttacgctgatcaaatactttcttgatctctactgggatcacgcctttgatatcacggcggaacatccacccgttaggagaacagctaaattcatcgctagggcgcggcgcggtcttattaatatactcttcaagagcacgtaccgcaaaacttcccataatcgtttcagggcttatattcacctgtcggatgatggaagggtacaggcttgttaagtcgaacgataccatgtatttgtaaggcccaggaacaggatccttcacaaatgccccagggtaaggggttttagtatggcgtctgttttccggaataacaaccttatcttcacgcagagagttataaatgatcgcgtcccacgttttcagcggagacataaccccagggaagtttatttttgcatagtacgctacagacagaaccagttcaataaagtttcgtttaccatcgatatcaagtacacggataacgtcaacaatgttgtacgtgatgtacagttggtgatctcgctgtcgtagttcagacagggaaccttcatactcaactttatttttaccagtttcgtattccgcgatcgcgtccaggcggtaagatggttgcggggtaaaactgaatttcttatacagcgccataccatccatttgagcaacgccggaaatgtcatatcctaattgttcgttgttgtaagcgtcggtagtggttctggctgttactttaccaaatgggctaaaatgccttaccacgttttgaccgaaaatgttcaggtatcgcgtgatgatatatgcaatatcgaatttgtcagagttccatccggttacaataacaggggttcgctctttccaatctttgatatatgcagacaataacgacttctcggtctggaaagaccgataaacaattttgtttaaatcttcttcgctaatatcttttcggtcaacgtttgccgcgcaccattcagcaaggccaccctcaaccagatcgtatacatagaatttatcttcgatgctatcgtaatgggtgatcgcatcgattggatattttgcttcacgtggatccggaaattctggggcggtcacctcgatatcgatagaagcaatgcgaatgtgttcgcggttgtattcaatttcatttcggtacatgtcagaaatgtaagccagtcggtaatcatccatacctagagcttccatcccaacatcgcgcatacgctgcatccagtttttagcttctttgatgctgtcaaactgttttttgaggcaaggcttgccgtaaatgtctttgtatggggtttctacgccattcatagcgtgttgatacattacgggcgcatatttcgtcttacgtacctgttcggtgccgttagagtcaacgaagcgctcataaatggtatctcccatttgttcaactgataggtaaaattcattcattggatcttgtcttctccattaatataatgttccattgtaacaccacctacagcaaattcaagtttactcgatgttctaaaaccaacaaaccttctgctaacaagtcacggatctttctcagttgaacaagctggcgttcaagtttaaacccgtcgaataacatgctgaaaatactggaattgatactatgatattttgcttctgcaataccctgattagctaacatgatagctttgttaaccagtagtttcctttccgctactgtatgttcatccagttgacaggttgcaagggaaaccaaatcatcataggcgcgttggtcgataacgttatccatacgggccgcgaaaatcttattcatataagtacggatcattgtgcgtcctccattcttttcataaagacttcttttgcttgttggatcaagtccagagattttttaatacgctcatagaaatgagtggtttctacttgattgcataacaatgtgtactctgaaatgttacgatcgtaaaatccaggaaagtagtgctgtgcatagctgtaagtgcgggtatctgacagattgcaagttaacgataacaagatgtcatcttttacaatcgggatgattaaagtttcgttggatttgattgaatccatgatttcgttaatagtcataatatatccctctcaatggtgtacacccaatataacaaagcccctgcacgaatgcaagggctttttgattagtgaccgatccggtacttgtacttgaggatccaatctgctttttgcgagtgagtcagtacgcggaagttgttttcttctgcaaacttcaacccaggggttacgatcttaaccatgccccactcttcgagaagtcgcgcaatgttgttccggcgtagttcgtcttcttccgtcatatcgacttgacgaccatcgagtttcaacagttctttaaaatgcacgataaaatacttaccttgctttttcagaatgtggcacgattgccagagcattttctttttgttgtttgcaataccaatacgggttagcgtttcacggatctttaaaaaagaatcgtcgctgattagttgaatttctaacatacatcaccattgtttaatcaatttttccaatttcttttgttcagctttgtttttcacaatacccaacaaagacagagcgacctttgcgtgttttcttttccaatcctcgaacattccgaggtctttaagttcctgcaaatattccatcgctgtacgtgtatttacactgtatttttcgcgaaggatttcgataataattttctcttcaaaatcttccgatagtttagcccatgcaccgaagcgtttagccttcctaacagagttgagataatagttatagtgcatttggtcagagatactaccgcctaccagattcatcacatacgcgttatatatcgtgtctatgtgctggctcattgcgttgtctacaaagtacttatcatacacttcatcgataaccaacggagttttaccgttgttgatttcgtctatgatgttaaacaaggtgttttctttatccttgccgtactctttgaccagttcttcaaccttatcccaatctttagaaagccaagcggattcatgcggggataactcttcttcatccagaaattccgccaggctcatgattacgcctcccagaccatagaaagcatcaggttcatcaacagatattgcagatgaatttctttattcatcgccagtccgtattgcgcgttgttttcgcctacaatctggatcagtgcgattttcgaatcctgattcacgatagggtaaatcgtatcagtcaattttccgataaaagtatcgtattctgacgcatatttaataacctcagagcgcaaccctttatagttcttttctttcagcagggtaatgatatgagacacatcagaaccaacgatctcattaagaatccccgcatcaatttcgccacgtttcgagtagaacccgatcgctttgataatagaacgcgcatccggataatgttctttaacaaacgctgcaatgactttaggatcatacttgatattctcgatttcaaggataccgaaacaacgcttgattaactgtttcatcagttcgatacgttcagcatcagacggaacaccgaatttaacaggaggacaacgagaaagcagagcactatgcacaccgttaatgttgttcgctgttacaatgacagaaacgtttttactgtatgcttcgataaagctacgtaagtgtttctgtgcttccgccataccagaacgatcgaattcatcaatgatgataatctttccgcctggtttctgcgtcattgatgaagcaaaacgatccagttcattacgaatgaagtttacaccacagttcgaaccgttgacaaagaacacctcagcatcaacctcacgggccaacacaagcgcgagggtcgttttaccagtgccaggggaatcagatacaagggtcatgttctcaacgcgcccagatttgattatgccccgcatagcggctttgtcaccagaaggtaaaatacactcttcaatcgttgttgggcgatagcgctgatcccatgcaaattcatcaggagatcgagagattttaccgtatttggtttcgatgatttcaatattttcactaagttccataatataccttcaaaataaatggtgtaaaagaaaggggccgtagccccttaaaactatcttacttgaatgtgctacttgcttcaagtactacgacgtaagcaacgccgttatcagaagagaattttgcggcccctttggaggaaatctcgactttgtaatcgctgttgatgaactgcatgttgtcaatcttcatatcaaaattgaaaacattgtcgccttcatactcaccgacttcaacagagaaagttgattgactttctttgcttttcgcggtgatgaccagtttaccatcaatcggttcgacggacaggtcggtcagtttcatcatgcgagacgctttgatcagtttttcgaaatcgttagccgtaatctggaaaatcagatctgctactggcatcaccagacgttttttcggtttcgggatcgtggttgcgtctgctgaacgttcgatgatcttcatcttgtcaccgcgaatcacgatttcaccagtggaaatatcatgagtgatttccgcgtcagtgccgacgatgtttagcatgttcaggaatgagttgagatcgtagataccaacatcttcatcaatcacatcagcaatttcagcttctgcgtatacaacgctgttgattgatttcgtcatgatgaatgaacctttggtcagcatgatcgaagagttgatttgagaaaagtttttcaggatatcaatagtttgtttagagaatttcatattcagcctttagttttcaataagtgttacttaataagtgattttacaacggtttccgctgctgtgtcaagcatatcagccatttctttaacggttgtacgcttcggatcttcgcggcgttcgctggttagtttacgatgttccgcaaccactttttcatcaatgtcacgatagtgtttaaaacgttcctcttgaggcatagctttaaacagttcttttgtttcgtccgagagtttagcaacccaggatttacggacgcggttcatgtagtcaacaaaaacattactttcattcatatatttcttctctaacttagaattctttgagtggggggccgaagcccccgcttgtattacatgtctaacagtttatccaggtcatcatcaccggagctatcagaatcatccagatcgaacggtacgccgtcatcttcacctaccggaaccgatgcaacgccaccagatgatttcacatcagatgtctgattgtcaaacttagccatttcgttatcgaagttgctcagttcgctatcaaggtcagcggaagcgctggaaccagcagaaccgatcgaactacccataactttattgaagcgagtagtaaggtcagccagcggtttgaattcgctttcggcagtaatcgggcggagatcgctcataccttcgaaaattgctttctgaacttcttcatcgtcgatgtttttgatcttagccggaacaccaaacgaactatcgtcatagttaggccaatcaccaacttttttcgctttcagagtgaagttagcaccatcaaacggacaggttacagcaatacccggttcatcaagttctggattaccgttaattgcggcggtgatcttgtccatgattttcttaccgaagcggtatttgaacaccttaccttcgttttccggagcgcctgggtctttaacgatcaggacgttagcccagaaactttgtttacgaccgatctggctcagtagtttatcttctggcccgtttttgttggctttagccttctcatacagatcgttttcggaaatgtacttacatgcaggacagccgtcataatcgccgtgggtagaggaacagttctcaatgtaccactggttgtttttcttgaaagagtggctcacgatacggacgaacgccagttcatcatcggaacgtgctgggagaaatcgaataacggcggaaccgtttttctgtgcgtccagggtcagtttccattctttctcatctttctggaagccggaaccacctttcagatttgctacctgtgcctggagtttagcgggatcttgacgtttaaaaatgctgctcatattctgttttctcgtttagtttagtttgattaacgtttgtttcattaagtttcgatattttatgatatctttttcagtaaggtcaaatatttttctgtatgcctttaacttaatgctaaagtcagaccaaataatatcatcagctacttgatcgtgtttatttatgatacctaaaaatgagtcaaaaatcaaaaacgattcgtaagatatcacatttgacaggacaagtttgcttatgtaggacgttgatgatttttcgctgtacttgaacaccagagacacggggatctctttcattttggcgaattcgtacacgtttttaacgtcatccacaaacacgttatctagtctttgtaactttcctatgtactgtctgtaaaagacaatactatcttcatcaacatcgcctacccagaaatccggattggctacgaagttggagaggaatataaaatagatttctttgaatgtaaagcgttgagctaattttacaaagaaatatctatcctttcgcttgttaaaggcgttttcactaactttgatctgccagttgtattgaaggacatcaaaacgcccctggaaatgagttttcatcgccagatataacttgtatacagacaaaggcacaagccgtgaattcgcctcgctatcagcaaacggagctttaaatctcacatgaagccgtccagagtggttgatgaactatgttcaagcgcaaccgatgggcgaagcatgtttcctttgatcgcttcgtcgctaatcttatcaaggatcgcgcgaggaaccgttttattcagcatcgcataatcaatggaattttcatccatccattgtagcgttgcttccatgtaggttgccccctcagaggcaaccaaattttcgatatacaaaccgacttcggtcttatttccgatcatgctttacgccttatcgatcatatcatacagttcgatcagttcgttgttttcttcttcgaaagcggtacgggcctgttcgtgatacagtttgaacagtttcccgaaggtttttccgtcgataccgaaatcagtttttgctttggatttgatatccttgaacgtaccgttgaagatctcaacttgagttttcacgttggatgcttctttgatcagttcttttacctgttttgctacatcagggtttgtttgtaaaaattctacactcattttgttacctcaaaaatcactcagtttttcgaacatacgggaaagtttgttatccatgaagtaacgttccattttggctttacttccggattttggagtattatacgctttgataatcgaattttcaatatcttttggtataaattcgaaatcgcgtagttcctcgttttctttgtaacgtgcggtccattcaggggtcatcaacgttgtcgggtcgtctgcctccagccatgcctctaactcagaggatttgaccgctggggcgcgttctccttcaaccttcgtcacaatataatcatttctaattttaatgcaagcgatactatcttttttatcgcctttgatatttttgtatcgcaaatcgttacgtggcgaaccgtacttaggcgttacccattttttctggggaggcgaccattgacgaacaccgttatatttctgtagttgtgtaaagtcgctatcagcggaaaccactaatactcgtctaccttcaccaacagcttttttcgtaacaacagcaattatatcatcagcttccgcaaattcaacctttaatccaagataaggcatattctgacggatttcttcgaacaccggattcaggaagttgttcagacgatcccaatcccattctgattcttcgtgttcgatctgacgacgttttttgtagtaccaggctttttgccgacgccagtaatttctgtcatcgaaggcaatcacgatttctggatactcacctttaaattttacaacgttaaaccgtaaagtgtcaagcaccagatgacgaatcatttcgatcgtgatggatgcttgttcctttggtttgaagttgttcatcagtgtagcgatggaaatgttagagatatcgatgaccatagtatcatcgggttccccttcatcttgcatcagcttgttcaagttaaacatgcttgcaaaactgctcatacatacctcaatttttcaaagaacggggttattgtagtaacttacgaaatgaagtcaatacaaaagaccataaaatttttgatcaataatacttgatctgatcaaatttatgatctataatttattaattaataattattttactacaatgatcattgtaggtcaagtactaaaatcaataaattttatataatttagatctgatctatagatcattagatctactttaaccttaaataatatagaatgaaatttgattttgtctacagttattatataatattcttaacttcaaagaggaaatatgaatactatgactaaagaaacaaccaatatctacgcagacaatgaaaaattataccctatcctctgtgcatggaaaaagcaaatcgccgaaacaggtgatcgcaaaatgcctaatgagttaggtgctgctattatggatattgcaaacgggctatcacgtcgttacaacttcaaccgttattccgaagattggaaaatggatatgattgatgacggaatttccgctgcaatctcaggactgcataacttcgatgaaactcgttataccaacgtttacggttacattaacaaagcatgttggcaagcattcgtaacacgtattctgtacgagaaaaaagagaacgcgaagaaatataaattcttccttgagcacgtttacgactgcgaagattcagatatggttagtattgcagacgaaggtttcattcaagatctacatgacaaactatctcagtacgaggcttccgccaccaaaaccaaagacaaggaagcggaagtattcccaacattggaagattttctatgaaagcaataattgacttaaacaaaatattaactgatatcgattacgaaattgacttgctaccctacttcgtaaaattagagttgcaaaacgtgggaatcccggttatcatcgatccaactgacgtaagaaaccccgatttcgaagtagaagaaggggttttgtcttatatgataaacgccgaaactatgatcatggagatcacttatgattgatgaagagaaagaagtactaaccagtgtggaagaagtggatccagaagaggaaattcgacaaaagatccaggcacgtgtagaagccgacgcattgaagcgagcacaaaaattcattaagaagaaccggactgagatcaaacgcctccgtagacacgcagaagaagccctattcaggggtaataaggttcagtatgtgtatgcggttaagaaactccgtgatatgctcaaacagccgtatacagaggatttcattgatacgatgtggaacacttcactagcatcaattcgaaatattgtagcttcacaacagaagcactaacaaacaagtagccccgaaaggggctatgagggtcttatgagaaagtacttaatgatcggggatactcacgctggcttgcgtcaggacaacccctggaatgaagaaaacctatacaatgtattcgtgcaaatcgtagaacactgcaaagcaaacggcattaccgaggctttccatgcgggtgatttctttgatgtgcgcaaggccaccacacaaaccacgatgaaattcattcgtgaacgtattgtgccactactggaagaagccggattgcatatctatgttctagttgggaaccacgattgccagtttaaagacaagatccgccctaactcgccgcgagagattcttgatcagtatgattgctttactgttgttgatgaaccgatgacagtaaatcttgatacttctccactacaatcaatcgatttgatcccgtggatttgtcaagaaaacacacagcagatttttgatttcatcaaaaagtcaaaatctcaatactgcttaggacactttgaactgtccggatattatttctataagaacagtaaagcggatcatgggcttgaacctgatttcttaaagaaatatgacatcgtgtattcaggccactatcatcacgctaacgaaggcgctaacgttttctatatcggcacaccgcttaccatgagcgcgaacgatgaggacgaaaccaggggcttctatgagctatcttatagcgatggtaaacgtgaactaactttcattgctaacccagtgtgccaccatcgccggatcacctatccggatcaaaaagatgttgatgtttctgattacaaaaattgctctgttcgtttgattgtacgcgaagttgataacgatttgcctaagtttcaaacaaaactggaagaaatagtttatgagttgaacattgtcgatcgcgtgatcacagattcagaagttgatactgactttgaaatcaaaagcgtatctggattgattagtgagtacatcaacaacatgcagatcactccagaagaaaagaccgaagtgtctgcaataatgagtgcattgtatgcagaggttacgagcaatggaaatagttgattacgttaatattttaaacgaaaaagggcgatataaagccctttataaaatgtttggatttgatgtgattgttgcagtacagcaggattcctataatgagtatgtgtcattggggtttactctggttaaagacaactatcacgaaacaaaggtttggacatttactgtcctgaatagcatggatgaagattccgtgatatactgctttgatagcacgattacaaacatgattagtgatatatcccaaaggataattgatgaaactcaaatttaaaacattgacttatcaaaatatcttgtcggttggtaacgtaccgatcgtcattgattttgattcagcaaagaaaaccctcattacgggtaaaaacggtggtggtaaatccaccatgatcgaagcgcttacatatgctctctttggtaagtcatttcgcgatctgaaagtcgggcaactggtgaacagtatcaacaagaaaaaatgtctggttgaactgttgatcgaatacggcaatgatgaatataaaatcatccgtggacaaaagccgaaagtatttgagatctggaagaatggcgaaaaactgccggaagattcagccgctggtgattatcaatcacagcttgaatcaatgctgaatattaacctggttgggtttaaacaggttatcgttctgggtactgctggttacgttcctttcatggaactgaaaacaccagatcgccgtaaattggttgaagatttgctgtctctgtctattatcagtgaaatggacaaactgaacaaatcatacatccgtggtgttaaccgtgaactggatacgctttcaatgcagattggacacgtacaacagcagatcgcaacacatcaaaagttcattgacgaacaacgggcaaaagcaaatcagaataccgcgcgttaccaggatatctatgattcccacgtagaaacagcaaaacaaatcaaagcacaattggtcgaactgcaaagccagatcgcagaatgtgtgatcaatggcgaagaccaaacagcaaatattcaaaaattgcgtgatggttatacgcggctctcaatgaacgtagaacagttgcaacgtcttgaggtgatgtatcgcaagggtggcgaatgtccggcctgtaaacagccaattagccccactcctgaacgcatggaagagattgcagagaacattaaaaatggtactcagaaacttacgctgattaagaacaagcaagatcagctacagaaaatcatggatgatttactaacacaacaacgtacactaaatgggctgaaatccaaatacgaatcactacgcggtacacttcaaaacgaagttgcagcggctaaacgtgttcgggctgtcatggataaagcacaggaagacgtggtgatcgacgaatccccagttgaaaaactccgtgaagatgaaaaggaacttgattctaaacgttctggatttgtcaaggaaaaatatttcagaggtattgttacggatctgctgaaagattccggcgttaaagcgagtatcgttaaacgttatattccttacttcaataaacagattgcgtactatctggatctgttgggtgctgattatcagttcactctggatgatgaatttaacgaatcgattaaatcgctgggtcgtaatgattttagctatgcgtcattcagtcaaggggaaagagcacgtatcaaccttgctttactgttcacctggcgcgatgtaaccagtaaaatttctggtgttgatttatcccttctgatcctggatgaagtgtacgatggtgcaattgatcgtgatggtagttttgccgtaaaagcgctattggatgggataaatggtaacgtaattgttatcagtcatcaggatttagatccggaagatttcgaccgacatattgttatgtcaaaagtcggtcgattctctaaaatggaagttaagaagtcttaaacttgcagttatcaaaatgccagcgattcatattgctggcatcaccagatttattgcaatatggacaaatcaactgtttcctttttgcctgggtctttctatctgggttatttctgcaatacggtatatgtgaacgcagataatgtaatgaagattctgttccgcaatatggacaattccccctttctttaggtacgtttccgttcttatgggaacacgggataccctcaaacttatgtttcaatccttcattacctggtttcagtttgcagttgtcgaagtgccaacgagtcatatttccaattatacctgattttccgcaatgaggacatacaaccctttcttgttgctttttggctttactcattcgctgtctggtttcttcggtgaactctctgttcctatgtgcttctgacgcctttttctttaaccattcatagcggcggttagctgttctttcctttgatctattggaaccaactgttaacatatgtgctgcaaaaacaagtttgttgtttcctgggtacatcttgactaataacagatgcgcaatataatgttgacgcgctgtaagattaaccaaattatcatcagaatctgttccacctatgcacttaggtatgatatggtgtgattctgtatatccatcatactgcgtttgtttagcatgttctatgatagagttataaattttgttatagttcataaacatatctcttgtttgatgggccgttagatacccctatttaagaggatgaaattatgttattagaaaaatcttttgaattagaaaccgctctggaaatagagcggttttatctccataacaattttcttgaagaaaaacatatagttacaatgaaagatgttgaagaagcattcaaaaacaatcctatagaattgacaagaatcaagaacaacaaaagttctgtttggttcctcgaaaaaatctattgactgaaatccataaatacagtaaagtagcccatgtaacgaaacgtgggctttgtttttatttgaggaaaaataaatgatcaccgaatccaaaatgacttatcaggaagcattgaaagttttgggcgcaactggtagcgaaaccagcgctgaaatgtccagacttttcaaacgtgcctccttacgcaatcacccagaccgtggtggtagcaatgaattaatgcagaaaattaaccaggcttacgatgtcgttacaaaaactgggcctagtggcgcacgttctgagactgctggtgatgttcgcgcacgttatgcccgtcaaaagaaagaatgggaagaaaaagttgatgcttactttgtagtggcgaaaaactatttcagcaccaaatttaacgcacaggaatttgcggaatacttcaccaaatacactgggttgcctactactttcaaacaggaagtaacaaaaggtagtcacggtgtttatgcttcgttccgtttcacttctggtgatgcttactttgatttcggtttcaactgcacccctccgaatggacaagggttagccgctccggattcatctgcactgggtagcgtttctgttagtacctttgtactggttggaaccaaaaaacacaaaatggcaagccgtgattatcaatggggcaaaaacccagataagatcactccggaaagcctgttcccgtctaaaaaactggaaagtattttcagccctgtacagaaaaatatcaaatacaaacgtgctgattacctggcgtcattccgtaagctgttaggcgctgacgttagcggaaacgatatctttgttgaagttggtacactgaaagttcgtttctatcgtcacgtattcatgcgcaaaggtgcttatgtgtttagcgcggtgtatgatcctgctgtagctaagtatcgtccggctgcacaacttcgcggaaccatgtttgaagacgaagacggcgcttgcctggatatgatcgttgatacattcaaagaattacagaaactgaaaccgagtgttcaaggcgttgtgaacgcgatcgataagatgaacgcagagtttgcggcggggcatcgttcagcatcttttgttaaacgtgtagctgctcaggaagccgcaccaaaaccagaagagaagccgaaacgtacagttaaccgtgttggtaaagaggaatactacgcagcctttaaacaaattggtgctcgcgtaatgcctacaagcggttatgttgagtttgataacggcgctggcgttaccatcaacttcaaacgtgttatcgtaaaccgtaaagcgtcttatgtgttcaacagctttaactttatgcattccggtatgaaacatgttgagtggttgaaggatatcgacattgcagaagataccaaaggcgcaagtattagcttgatcaccgatactctgaaatctttacgcggtatctctgactggaacaccgttaagagtgctttagagcaaatgaattccaacttcaaagcgggtaaattctccgcgcctcatgtgaagaaggaagcagagcaaaaagcaccgaaacagaaagacgaaatcggcgcacagcctaccaaaccacaggcggctaagaaagatacaccggaagtggaaaaatcacaggctgttcatgcagcacgtgagaaagcgaatatgaacaacactattcgtaaaatgatgactatgttagtcaaagcacagcgtaaagacactccggaagatatcaagaaggaagttgatgcagcaattcaattgtggcgcttgacttactaatcaaatgaactataatgggaactgttaacgcagttccctttttatttgaggaaaatattatgagttgtccaacatggttacgtttggaaaatccgaaagaaggtacacaaaaacgaatttatattaatcttggttgggttccacctacagattttcaaatggctgagattttaatcaacgctattaaagaagtaagcgacacttacgaatgggaaaggctctattttcctttaattggtttgtatatgacgcgaaataaatttgaagaaatgaaacttgctgttattcgcgctacggctattaattaccaacaaagatttactttgaaaaatgcatggagttctgaatgattattcaagtatctgtacagggtgacactctgactgtcacacaatccatcaataccgctcttgctgtatgtcgtgaccatatctcgcaaaatcctccagtgactgagatcctggaaattgatgtttgggatcagattgggatgatcgacgcatcatatggatttaccccgcgagaagaagaattatctcgtatcgaatcatggttgaatgaacaggaaacggaatgaaactccctaagaacacaacactactaacccgcgaaaaacttcactctgttgattggtgtcctctggatatcatgatttttgatattgaatctcgcgtgatcaatgcaaaatatcaggggtgtagtattttctctgttgaattcgagaagattcgcggatatgatgagaagtacaaagaaaaactgaaagttatgattgaagcattaggctatattgtaactgttgaagacaacaaaatgtggatcgcaatatgagcatagtaaaagcggtgtttgcattgggaattgatatctatcacgatgatttcgcttttggatatcagcaagggttgccgtggggccactgtaaagaagatttgcagaacttcaaagaagaaaccgcagatagcgttttgatcatgggtgcaaatacgtttacctctcttccgggtaaacttcctggtaggatccattgtgttctgtctggttcaggtagttttttgaaaaccaaaaaaggcgacgttgctgattacgtgatccacggtggcgggttgtctgctgctattggtacaatgcaagcaacacacccagataaaaatgtatgtgtcatcggtggtaaggggttgcttttagattcaatcaataataaaatggttgatgaagtaattttgacaaacatttacggacatcatgtgtataacgcaccagcgtttaaacgtgatgttgcgtttactctttctgaactgggtggcgcattattaaaatatgaattttctgatttaaaaactcagtacataaaagaacatgaacgcattgaaaaaatcgtagttgaacgatataaaaaggtataaaatgaaacaatatctggatattattaaacttgtacttgataacggtgttgaatcaactgatcgcactggtgtaggtactattcgtattttcggcgcacaagcccgatgggatctaaacagaggtttccccgcaactacctgtaaaaaactgttcttcaagccttgcaagcatgaattgcaatggttcctgtctggttctaccaacgtggaagaactgcgtgagatgacgtggggcgaaggaagcaacaaacgcaccatctgggacgataactatgagaatcaggctaaagcgctaggctattctcatggctacttaggcccgatctatggtcatcaatggcgttcgtttggcggtgatttgtacggaaatcacagcgttgaccagattgctcgaatcgtcaaagaactgaaagaaaaaccggacgatcgcgggatcatcgtttctgcatggaaccctgttgatctggataaaatggctttgcgtccgtgtcactgtttcttccagttcgttgtaatcaacggtaaactgtctctacagtggtatcagcgttcagttgatgtcttcttagggttgccgttcaatatcgcctcctatgctctcctgacgcatattatcgctgatatttgcggttatgaagtgggcgatctggtttggactggtggtgatgtccatatctataaaaatgcggtcgaacaggcaaaagaacttttacagcctaaccgttcaccaatgccattaccgattctaaaaatgccgaaggtaaatagcttacttgatttagatcaagaattctttgactcgataaccttagaagggtatcataatcacggctctctaaaagctgaaatggcagtatgaaaaatggggcttcggcccctttcttaacaaggtaagagaatgaatgacattaaagtagtagtaaaatcctctggtgtacgccagccgtttgacaaagaaaaaatatacaaagtgctcaagtgggcttgtgatggtcataatatcgatgttcgtgcattccttgaaaatgtattagaactgatccgcgatggtatgactaccaaacaaattcaacgtatcgctatcaagtatgcagcagatcatatttctgttaaagaaccggattggcaatacgtagcatcgaatcttgaaatgtttgcattgcgtaaagacgtttatggtcagttcgatcctatcccgttctacgatcacatcgttaaaatggttgaagcggggaaatacgacaaagaaatcctggaaaaatacagcaagcaagatattcaagttttcgaacgtgcaattgatcatgataaagattttgaattttcgtatgctggttcccaacagttaatcgggaaatatctggttcaggatcgcgatactggcgaaatctttgaaacccctcagtatgcgtttatgcttattgcgatgtgtctgcatcaggaagaaactgggttagcacaggttacgcatatcattgatttttataacgcaatttccgatcgcaaactgtctctaccaactccaattatggcgggtgtacgtactcctacgcgccagttctccagttgtgtagtaattgaatcaggggattctcttggttctcttaacgctgtaacctctgcgatcgtgaagtatatttcacaacgtgctggtattggggttaacgcggggcatattcgcgcaatgggttctaaaatccgtggtggtgaagctgttcatactggtgtgattcctttctggaaacatatccaaaccgctgttaaatcctgttcacagggtggcgttcgtggtggtgctgcaacattgtattatcctttctggcatctggaagttgaaaaccttctggtattgaagaacaacaaaggcgtagaagaaaaccgcgttcgtcatcttgattacggtgtacagcttaaccagttgatgtataaacgcttaatgaatcgtgattacattacgctgtttagtccggatgttgctaacgatcgtctgtatgatctgttctatgaagctgatcaaactgcatttgaagaactgtatgaaagcctggaaaaagatccaactgttcgtaagaaacgcatcaaagcggttgacctgttccaacttttagcacaggaacgcgcacagacaggccgcaaatacattttcaacactcatcacgtcaaccaacagggtagttttacggttcctatccgtatgtctaacctctgctgtgagattgcgatcccaacgtctccgctggatgacgatgataaaatggctggtgaaattggattgtgtacgctaatggctatcgttctggataacgctgatatcagtgaattcccgaaactcacacgtattgcagtacgtgcgcttgataacctgctggattaccagaactaccccgtaaaagccgctctgaaagctaaacagcgtcgttctctgggtgttggtatcaccaactatgcatcatggttagcaagcaactattgcgactactcagaagcgtatacagacaaagttcatgagttaatggaagcgtttcagtttaaccttctcgttgcttctatggaactggcgaaagaacgtggtgcgtgtggattgtacaacgataccaaatacgctcgcggattactgcctatcgattggtattgcaaaactgttgatgaactggtagcacctgtttataattgcgattgggaatggttacgcagccagattaaaaaatacggcttgcgcaactctactctttctgctttaatgccttgtgaaagtagttcacaggttagtaactctaccaacgggatcgaacctccgcgcggtttagtgagtatcaaatcttcgaaagaaggacactataaccaggttgtgccaaaccaaaataaccagattgatttctatgatctgctctgggatatggctaaacgcggtaacaaagggtatctgtctcacgtagcagttatgcagaagtttgtagatcagtctatttctgcaaacaccaactatgacccggcaaactatgaagacgggaaagttaaaacagaagacatcattgatgatctgctgtatgctaactactacggtgttaaaaccttgtactatcataatacgcgtgatggtgctggtgatgaagatgaagccgccgacgattgcgcgggttgcaagatttgattaatgccccttcgggggctttttaaaggtaaagacatgttaacagtaatgaatacaaacccagatcataaccacttagaccaacctatgttttttggtgaagatactggtgttgcacgttatgaatcgcagaaacacaaagttttcgaaagcctgacacaaaaacaactttctttcttctggcgtccggaagaagtcgacctgtctactgaccgtatgcagtacgcaaaacttcctgaacatgaaaaaatcattttcgattctaacctacagtatcaaaccctgttagataccattcagggacgtgggcctaacctcgcatttttgccaattgcatccgatgtgagtatggaaacatggatcgaaacgtgggcgtttagtgaaaccattcacagccgtagttacacgcatattcaacgtaacttgcacattgatccttctgtacagttcgaccagatccttcgtaatgaagcgattatgaaacgttccgcatcgatgacacggtattatgatactctgattgatgaatgtcataagctgaaaaccatcatgatgctacaggaacaggttagcggctataaaccaaatgatccggctgtcgtgtattataacgagcaatacactaaacaggccactaagtgcaaagaagcgctgtacctgtgtatgcacgctgtgaacgctctcgaagcgatccgcttctatgtgtcgtttagtttcacctttaactttgctgaacaaggcaagatggaaggcaacgcgaaaattatgcgcctgattgcgcgtgatgaagcattgcatcagaaaggtactcagagtaaaatccgtttgtggcaaatgggtaaagatgatccagaaatggttgaaatctcccgtaggctgaaaaaagaagcaacggctatcttcctggaagtatatgaacaggaaaaagaatgggctgaacatttattctctgttggtgatgtagaaggtgtatcgctgaaaagcactatcgcttatattgaacacctgacagatcagcgtatgcgagcggtcgggcttgattcaccattcaccccgatccctaacccgtatccgtggatgaataaatggctcaaaagtgataacgtacaggttgccccgcaagaggttgaagtaagttcttacctcgtcggaaacctgaatactgaaatcagcgatgaagcgtatgcaaaatgggccagcaaatacgcgtgattgtcgggtagtaaacaagtacaaaactgattgggatgtcgatattcaaagaggtacgaagttcggcaacccttatcacacaggaaccaggggagaaaacattttagcgtttatcccctggttccagaatcaggttcgtactggggcgatcacgattgaagaattgaaagaacttgatggtaagaggcttggttgtacctgtgcgcctcttccctgtcacggtgattacatcgcgcatgtggttaatgttttgtgtggtaagaaaagatcacttgactttttggatatataatgtatgaaatctgaattcaacttaacccttgataaatgtggtcgcatcgatcgaagttttgttaagtgtggtgaacttaggcattgtgtttattttattgcaattaacgatgaaatagtatatgttggtaaatgtcgggatatgtggaagcgtttagacacgtatcgcaatgcaaagtattggagagaagccaaccccagcaacatcttaaaaacgtgtcgattggaaatggctatcaaaaaacgaaaaactgtgaaacttatcgtgactactcacgatgaaaatacatatcatgattatgaaatcaacatgatacgaaaatacaaccctgaatggaataaacagcactatgacaaaggcacaaactaaaattatcaataccctttacaaacaactcatgcagttgtgcggtgaatctgaaacatttttcttcgttgatcaagtaaccgtgatgggtacacctgttcgaatctttaactatcgcatggcctcatatacagactggctaaagcctggtgctctggaatgtcgcggtatcatgtttgaaatgaatggagatacccccgtatcaatcatcagccgccctatggagaagttttttaactatgccgaggtaaaggcatgggaagcgcttaacgagtctcctattgaattaggcgacgttttagacgtgatgattaaagaagatggttccttgatctcaactttccttgatggtggatttctgtctgttaagtctaaaggttcggttaaatcagaacaagctatggatgcacaaagcgtgttaatggcaaaccgtgaattgctgacccgtttaactgagatcgcaaaagaaaactatacggtgaatatggaatatgtttccccgaaaaaccgtattgtcgttggttatgattctcctgatctgcgtatcctgaacgttcgtcacaacatcacgggtgaatacatcccttatgatgatctgtttgctgacgcgctgttacgtgcgtatctggttaagcgtgagaatatcgaagtactggatctggatgcattcgcaaaagaagcatatcagaatgaaggattcgaaggctatgttgttctgacaacgaaaggatttgtaaaaatcaaaacaaactggtatgtcaacctgcatcgcacaaaagatagcattaccaacaataaggatcttttcctaaatattgttgagaatacggtcgatgacctgaaacagctattcagttcggatctggtctccctgaaaaagattgacgatttcgaaaaacttttccttgatagtctcaatcgtttgagtgcaaaagcattcaaagccattgaagataacaaagggaaatcacgtaaagattttgctatcagtctaagcgcggatttgtcaaacgacggtcggatcatattcgggcctcttatgaagtatttcgaagaaaccgatccacaaaaactggttgaccgcatcattgacatgatggttaaaaattacgaccagttcattcctgaacaatataaatgaggttcataatgcctaagatatcatcttgggtatggcctgtaatcgtggggctatctttgatagcccttttttacattgcagtcgataccaaaatcgaaaacgcatcgttacgcaaggatatcaaatctttgcaagatgatgtgaagaaagtaaaagagacaaatacaagcaatactgttatctacgtggaacaaaaatccaaagatcagcagttagtcaaggatgcagggcgcaaacaccttttgtttgagaaacctggattgattgaaatcaaaatcaacaaatccttcgacgaatacatgcaggaatttgaaaaatgaaattagcaatgatagtattacttggtgtttttctcgttggttgtgcggaacagccacctgttaaggtacttcctacgctacccgcaaaggttaacccagtgaaggtaaaatggaaagtaattgcagacgttagagaaatcgacgggaaacaataccttgtaatgccatatgatggtaatccttatgttgcattgacatatccagattcattgattttacgtagctggatgaatgacgttaaaagacaaaaggatcaaaccgataatgttctgtgtacgttaggataccctgagaaatgcaaatcaaaataaccaaaaccttttttcgtgacataacagaaggaaaagtgtatactgcgaaaaaggataaagaaggtctatggatagaaaatgactggaaccgtgatatgtggctcaatcttacgaatgagcataacaaagaactaattgaatatgagatagtgaaatgaatctgtttatgactattggcgttccgggtagtggaaaaactacctgggcgcatgagaaagcccgtgaattgggtaatactgttacgatctctcgcgatgatctgcgtagctctttgtataatgctggtaaaggtgctggcggatacaaatacaccaaagcgaaagaagaaatgattgcagaaatgcaagatcacgttgttatctctactctgaaagatggtaaaaacgtgatcatacacaacacgcatctgaaagaaagtgataaaaatcactggcgtgaaattgcattggaacacaaggcagattttcatattgaatattttgatgtgtccattgttgaattgcttcgccgtaaccacaaacgcggtcgtgatgcattacccgtttcgcgtgtttgggaaatgtttaaccagtatcgtaagatccgtgggttcgtaccagcaatggaaattgttaatccacacaatcagaagtgtgtgatctttgatgttgacggtacgctaacaaaagtagggcaacgtagcccgtatgactttaccaaagtgatcaatgatccgccaaacatcccgatacaacaactgtttcacctgtacaaaaatgcagggtataaatgtgttgttgtgtctgggcgtgaaggtaatccgcaatgcgcacatgatacatgggttagcctgttgagttatggcgttgaaccggatgaaatttttatgcgtcaagaaggtgataccaggacagattttgaagtaaaagaagaaattttgtttgacaagattttagataagtattatcctgttattgcagtggacgatagagacactccggtcggaatgtggcgagcaaacgggattccgtgcttacaagtcgattatggtgatttctgattgacatataatgtgggtatgttaaagtacccacacaaaagaggattatattatgaacgttattcgtgaagataaacacatcatggttgaacttggcgatcgcattcgcgtagaaaatctgggcgattttaaccaaaaagttcgtttgttgtgccaaaaaattgctaacaaaattcaggaacagggtaaagctccgggcgggtttgaagttagcgccactccggtttctcagtactcctatattgtgtatattcatgacgtggatactaacagcacccaatctttcgggctggtgttaaatcctattactggctacgttacatgggcggctgtattatgaacgtaaaaattattgatagagcggtaatcacggacgaatctgtatacccggatcctcgttattatggcggtgttttcggatacatcaaaggaactgatattgatgtagtaacaagtccgattgcagaatatgatatcaacaaaaatcagacagaagttcgcgttactacaatcaacggttcagaatatatcgttgaagcgactcctgattttatcaaacagctactaaaggtgatgaaagatgcttgatcatcctggctctatgagtatggtgctcctggaagcattaaaagcatatgatattccttgtcatttcggtgaagtaactgttaatactatcattgacgaaatcgacaacccaaatactttcattgcttgtcttgttcgaaaattcacaagttgttttcgaccgagtccagaaaaagtagtaatcagttctgtttctgcacatcatcgagtgttagatgatggaaagattcaactttactggaaagttctttatcacgtggtgtatcatgaagattgatgatattatgtttatgcttagagcaataagcgcttctaagttctctcaatgtgtctctgttaatgtcggtgctgcattgagaaatggtaacgggcgtgtgtttgtaggcgcaaataatacggttgatcctagtcatcgttgtacagatcagtgcaatcacttattagatgataatgggaaactgagtgaagaaaagcgccctgaacattcacaatggtcagatcgcaacgaagtacacgcagaaatgcgcgttattatgctggcggcgtctcatgaacaaatcaaagacgcaactttgtatacaactcattccccttgctcacaatgtgcgaaaaatatcgaattttgtgttgcaacaggtatgattaagcgtgtagtatatctacataaatacgatcgtggtggcatcgagtggatatggcgtctacagcaatacggtgccgaagtagtacaacttgaccccgaagaaatgaataaacatttccggatcaaataacaaatgagtaaatgtatgtctgaactgagtgtaaaagcatcctttgaatatgttttgattgaaaccaacgctaaagcggctggaactgaaattgtatcaccttctggtattgtgactggtgttcgtcaacacggcgaggaaccgatctacggcacagtgttatcatgtgggccggatgtaccggaagaatataaaaccctgcttatgggtaagcgcgtaccgcttcctcatgcacaaatggcaaacgtgccggatcctgaactgattgcaggaaaggcaacaaaagaagaagctcgcaagtatccggttaaatatgtaaccgcacactataaagcgattcaagcaatttacgaataagagatccaacatggctaaacaaattcaagcaatcatcgccgataccgtcgcaaaatccaaaaaacttttcgacaaaggcgacatcctcgaagcaccgacccgcatcgatgtaatgacttcaatgatcattgatgctcaccagggaaaactgaattcccgtgcttcggaagtaatggaatacatcgtacagttcgaggatgtatgcaaatacgccaaagctgttgatccggctgttcgcgaaatctaccgcaaacagttctaaaaatatcggccccttagctcaataggtagagctaatcactcataatggttaggttcccggttcaagtcacgggaggggccaccaaacaaggcaaggcacttagagaagcgggaggaacagaatctgattctgttggttgtaggtgcaaatcctacccttgccaccaaatttgggtgcgagcgcaatgccgttaaatggttcggaatatgcaaccttatccacgggaaaggctctgttggtatccggtaataggttccccggaatgcggggtgaagtaaagaaactcccagcccactaattttaatgaggtttatatgaaatttcgtgaaactgtgaaataccataacgcggtcgaatatacacagatttttgttgatatgtctcctgcaaaattcaaagaacgctatggtatgacatttaatgaatggaaagctggattatccgatggggattatcgaaaaaacttcaaattcagtgaatgttatgtagatgatgatccttacgatcaggagattttcggtaaaacaacacctctcattgagaattcaccagaacagctttacgaatcttgtattgattccgcatacgaaatttaaagagatatcatgaaaaatttacaaaaactgtttgaaatgtctccggcaattagaaaaatcatcggagaaaatagcaatccaacgaatcgcaataaaaagttgatggaactttttgtaaaagagttcgatgattttgattctgaacttcataaagcgtttgaggcatattccaaacaagggttctttgcatcaccgcaagtgaatagtaagaaagagtatagcgaacgattctttgattgggagattgtcaatctcgttcgtagaacagatatatctccgagcaatcaccaattgatttctcttgatacttcggtattctttatccagtatcttatcagtggtggtttcaaaaatcctgaaattccgtttacaaatgaagcggttagcagtgaatttgatgaatcatttgtatacatcagcacaaacaaataatcaaatggctatcttcggatagacttatttttggggtgtctatgcgctttttaaagtatgcaagttggatcgtactcgtccctcttgacattattactggagtattagcaattctgtttgccccgtttgttgtgccgttctacaacgagaaaacagggcatcttcctaaaggattccggtggatggaaaccttcgataaccctattgatggtgatggtggacatatccgccgttgggcgtctatacgctatcatctgggggcttttggggtatacatgcagcgtgttggctggttgtggagaaacaaggcttataacttcgcatatcacgttttaggacgtgaagcgacaagcaaattcaactggaaaggcaacccaaaaacagaaggtgggccaaaccccgtaaatcatggatatctgctcatgtggaatgaatcagcatgggggttgtatgtctataaaccgtggctacggatccacaaggtgcaattctgtttgcgtgtttatgctggatggaagctgaaacaagaagttagcgaccctgttaacctggatcgtgcaatgctggcgtttcatttcaatccattcaggtattatgtaatcaagtaaaggtaatacaatgaaagcatttcaaattttagaaggtttgcatactggtacaatctatctggaagaaggtaacgacgttcggatcgtagtatcaaaaacattaactatggattctgtgatcggtaaagctcgcgttactccgtttgcaaagcgagagatcgagatcgaatatcagccaactgttaaagtggaaggtggacaacatctaaacgttaacgtgttgcgccgcgaaactctcctggatgcggttgaacatcctgaaaaatatccgcagttgacgatccgtgtatctggttatgcagtgcgttttaactcactgactcctgaacagcaacgcgacgttattgcccgtacttttacagagagtctataatggcaatttctgatatcacgggttataaaccccatactgataaaaaagtagaaacagtaaaccgtatcaaagatgctgaaaatgcattaggtgcaatcctggaagatatcgaacagcgactatcaaattcagatattgattcgctgatagaggaagaattagatgaggtgcttgaacgtatccatcaaattcaactggcgaaagaccgactgaaagaagcctctatgtgggcgtgtcgtgcggtgttccagcctgacgaaaaatattaaaaatcaagccgttgccgaaaggtagcggcttttttcgtttttacataaaaagttgttgactctcttctcacattaccttatagttaatcccgtagacaagaaaacacttttatgaggatgacattatgaaacgctcttacaacatgaatgaactggttttcttcaaaactcgtcgtgaagcccgtgcttacgttctggcggctggtaaaaatacttctgctgctatcgatatgggtactgataaagctgttggtgctcgttgggccgctgttatcgttatcgctgctcctgttactccggttaaaactctggtacttggtgcgcgtcacgctgaaactctgaaaaccagcacttatgggacgggtggtgttcataatgttacagtcatcaaaaaacgtagctttggtgcgagggtttaataatgagtacaaaagaattagaacaaaaagtaatggggttcatgagtaacagcgaagatcgctatgcgaaacacctcattgtcgaactgattgccgagctacgccgtcgtgatcgggagatcgaagacctgaaagcagaaaagcgtgtcgttcgtgaagtatatgtagaacgtccagaagaatataactttggccctggtggtgcataatgagttcaatcaacactgaaaaagattttgtgatgtttgtcggagttcagaccgtaaagaaagacatcttcggtaatctgtacctgtcaaacgatgatcgttaccctgcatcattcgataccgaagaggatgcatatatcgcgaagaacaacagcgataacgaagacattcgtaagtatgcgcggctttatagccgtgaagtaacaacgcgcctggagagagcataatgaaacaatattttattgaagcggcagatcgtatcgttctggctctattgaactggaaccgtcgccaggatgtttctatcgtggcatcaaccaacgggacaacatacgaccgttatgatccggcgcgtggactccataaggtgaaagaatgagagaacatgttctgattcttaatgacgcttattttagccgtgatatggtgtatagtctggcgaagtatggtgtgttgttacgttgtgtaagcacaaaggctggcagaaaactcgaagttgttctggaaggtagggcggaagatatcgacagttacatggctcatattgacgcggtaagaactggatattctcactgggataaggtatcattgctatgaaatactacggattcaaaacgagtcattttggtaaagcgtatcgcacagaaaacatcgatcgcaaacgtccgtactatgattcgttagtacgagcgggacgtaaacgcgctcgccaggaagggaagaaagagggtgaagatcgtggataactggaaaacatggatatcaattatcgttggtgttatcatcgggcgcggtttgtatgatttaatcttttcaataggggttaactatggacattggttcgggtagccagtacccatcatgcgcgttaagcaactttgcccctcatccatttacgtttgatggggtagaatgtgcatcaatggagggctttttgcaaagccttaaattcagtaatcccgatatgcaagcccatgtgtgtactctggtaggcaaggccgcaaagttcaaaggcaaaaagaaaaaatggtggactaaccagaccctatactggaaaggtatccctattcatcgttcctctgaggcgtatcaaatcctgattgaaaacgcatataatgcgttattccttaatgaagggtttcgccgtgcgctggcagcaaccggaaaaagtaccttgacacattcaatgggaaagaataaaataaatgaaactgtactgactgaaagagagtttgtacgcaacttaacccgattgagagatctattatgagtgaaaaagaaagagtagaatgtgtgttccttttcaaaggcgcgatcaatccattagcgttactgtatgcgcaacatgcattacgttcaacgttgattcaaagtgtcatctataaagcaggtgtgtattatgttaccatcggcgcaaataacatggttgttattgaatcctacgttaaggaatgtgcatcaaacggcgttgtctttgataaagtcgattttgatgctggggtagatgctgtttatatgtataagggttaatatgagttacgtagtttatttcgattgttcggatctcgatccgttcgtgcttcaacaggcaaagaaatatcatcaagatgttgttggcattggtgtaacaaatgatgatatgctgtgtattgaatttgaatactatcgtaaattcgagcgtgattatttcctgggtgaattgaacgcattcaaaagtacccttttctttgatcgttatgaggttatatcttgaaacctgttattcttaccgatattgacggcatcgccgtaaaatggcagtcggggttgccgttctttttgtctaagcacaacatgcctactgatattgcattggaaatggttacggatgaaaaatttcgtgatatgactgaaatcttcggatgtgatcagcagttggctaaaatccttatggaagaatacaataacagttctttcattcgttatctgaacgcgtatgatgatgcattgattgtgatcaaccgtctgaaaacgcaatatgatttcgttgccgttaccgccctgggaacaacaccaacagcaagccttaaccgaattgctaacctgaatactctttttccttctgcgtttaaagaggtgatggtcgtgggccacggtgaaacaaaaactcatcgttacctggaagctaaagcaaagtatggtaatcgtctggtttgctttgtcgatgatctcgcgataaacttaaacgaatgtcataacgtcattagccagttgccgttattccatatgttacgtggtgaacgtgaagaaacaaatgcacctcatcagttagtaaaatcgtggtttgaaattgaagagaaattaaatgatcttgtcaatccttaatgaacttgcttccactctgaaaactaaagagaaagaagcaattttaaaacgtaacgcagataatgaattgttgaaagaagttttccgcattacgtatacaaaacagattatgttttatgtgcgccagttccctctggtagaagggaaaccaggcacaacaccgctttccgatgcaatcaaagcattgctggaagatttagcaagccggaaatatacaggcaatgcagcgcgtgatcgtttattggatattgtatcatcagtgaacattaacgatcgtgaagtgctacgccgtatcattaaccgcgatctggaatgtggtgctggcacaaccttaccaaatcgggtatggaaaaaacttatacctgaacagcctcaatgcctcgctacgccgtttagtgaaaaggctttacgtcgcatcattttccctgcttactcgcagcttaaagccgatggtgcgcgttgtatggctgatttgttggaagcattaaaccgtaaggtatcgagggcgggtaacgagtacgaagggttaacccaacttgatatcgatctgaaaaagatgcgcgattatctgggatatgatgtagttctggatggagaattgatttatgttccttccggaaccgtaccaacattacctgaacctgaaacagacatgcctttttctttatctgctttcatggacgatgatgataacgacattgcgttatttgcggaagaagttcgcaaagtatcgaccccagaagaagaacaggccgaagcaaaacgcgaagaagggaacgggatcgtaaacaaatctctgaaagggacgatcaccgaagaagaacagcgaaacattgtttatgttgtttgggatattattccatatgaggtgtattacggcgaagctgaaagtgttcagacttatgatgaacggtttagcctgttgcgcgatatcctcctggatctttctctgccttctgttcgtttgattcagtctaagctggtgaataacattgcagaagcgaaacaggactataacaattaccgcaatgacggtaaagaaggttctattctcaaaaacagaaacttcaaatggaaagattcgcgagtagccgatcaggttaagctgaaaaacaaaaccccgattgaattacggatcattgatatctacgcgcacactaaagaagaccataaggtcggcgggtttgttgtggaagatttatccggaatggctcgaacgaataccggatctgggttaactgatacagattatcgttacgatgatgatggcattacccgtgtatacattccattagatgaacgtggtgaactggatcgcgaatacatcatggcgcataaagatgaatacattggggccattgtagaaatggaagttgacggcctccagaagtcgaaaacgcgtaagaaaggggaaccggaatacagtttcttccttcctattatcaagaagataagacgcgataagactgaacccgacgatattcatgttgtctttgcagatctattttaataaaaagcccttgactccggtcgggggctttgttatattagccatatcgaaacgaaacacggagataaacaaaatggctcacatgatgaagaaagcagaattccttaacctggttaaagattgtggatttgctcacttgaaaacttttcgtggtagtgtttacctctatgaccgcgaaatccaggttgcggaagtctattgcgcttctaacatgcaagaatctggtattatctctgcaatgaaccaatcaatcaaataccgtaaatggatgggctgattatgaaagttaacgtttcttatgaatctcgcgttaatggcgcacagtggcggaagctggataacgggcaagtagaaaggcgtttacctggttcagatgagtggatactttcggcagtgttggaaaccgaaatcgatctggcaacaaaagatggtattttgtttgaggtgaagaaatgatcacactcagtgattatcttctgtttactgctttttgggtggcttcgatattcataactgttttgatttacaataaacgggatgattttgggttgttgttattcattcacgggtttcctctttctatgtggatcgtgatgactgctgaaattctccattaatagcactttttgctaaaactatcttgttcttgtttggtatagtgtgctcatcgaaacgaaacagacaaaaggaacatcacatgaacttcatcgatatcaacaaagatttagaaggtaaaaacatcaaactcgttaaccgtgaaatgttagagagtcttggtaatggtggcgaaaaattcagtgaagaattctataacaatttatcgttgatgacggttaagcgcgttgatgttcagggtggttctggttgggtttctgcaattccggtttccctggtagatcaagcaacatatgacccagttgccgattcatgggatctagaaatgccgttggtattcgaagaagtcatgaagtgttacgaaattgcataggtgagaaaatgaaatttgaagaagaagaagtgaaagaacgattatcaaccgcgcggcgattccttgaatcgattgatttcgataaactcggtaaatatccggatacaatttgccttaattgtgggcgttctgttcttgttggtaagtgttgcgataatccaaatatcgttgtgatggaaaaggaacaagtatcccccgaaacatgggatcagattcaggaaatcattaaaaacccgccagcgccaactaaaaaattacgtgaattgatgacaaggaaaatgaaatgagcaaatttaaactgagtgcaaccgttcgtcttattcgctggaatggtgaagagatccgttatgatgaccctgaattcgctcatgaaatgctttcgcatcgtttggggttgaaaaatgcgtcactagttcaaaccgtgaaaacatcagcggatccggaaatctggcgttgtgtgatcctggatctcgatagcagtattgactatgatgatcccgctaactatccgcttctggaagcacaagttgataatgctccagaagacagacagtgttttttggttgagttaccgcgcgaacattacgaaaacatcgtaaaggcccgtagaaaggccaataacaatgttttcgatctccacctcggattgtttgaggattaagtactgctagttgtgttcgtagtagcggcgctggtaggttcccccacctgtatacattcaagtgtttgcaggtggaaatcttttgatacgtctcgaacacattcaacgatcagatattttcctgcatattcttccccaaatacctcaatgattgttcctaccttaacatctaaacgaccctgctttatatcgaatcggatccggcgttcatagctggatagcaattgcattttagaagcctggaaaggtttaccttctgaatctgggttctgaaagttggtatcatagattgcattacggtttgtgaagatccatgtattctctgtgtctgtatcagccagtatatcaccgtacatctttttatcagtcaatgacagactaaagaaactagcgtctttaaacagcgttgtgttatccttatgggtaatatactgggcttctgtgaatatgacagtatcaccaacaaacacgttatcaacgttaaatttgtatgtcgggatcggtgtctgggccagaatgtcagttgaacttttaaggaaaataccggaaccatcttcccacagataacagaagtcagaagaaactacactttgcccgttgtccctgatataatcaaatatatcctgatatgtaccatttagacatccaggagggatacgtatgttaccaccgtcaacttcgggggtaagcagtttcattttgctatacagtgccgtcatacactctgtaatcgtctgtacggcgttattgctaaatgaacgggcaaacttacgtctgaacgttttatgcagcggagagaggttcatacgcagcacagaacggtttttatcgtcagtatctacgttagagtaaagcaatccgtaatagtgttgttcctgtgtaccgttatactggaaagatacctgtatgatcggctggataagttgctgatagattaactgtgcatcgtatatctgcatcagtgtttcagaagatccattaatcatcgtcttttcactaaacgagacaagagcgggtaacaattcagtgtatgtattgtcaatatatttttcgtatgatgtatataatttaatcgacgtgactcgattgacgattttttcagccataaaaatccctcctaatatatcctatttactaaatagtaaataatgacccaggttcaatttgaggcaataatgaaaaataaaactcttgataaatttatgactacacggcttgaaatcaagaagacaaacgttaaaaccgttcatcttccggatggaacagccattgagatccctaagatgtcgtatcgtcattttgtaaagattaagactctgaaagatgacccagttgcgatcatgcgcttcatcattgatgacatcaaaccgcgtgaactgacagcagcggaaattgaatttgtgttgatccatatgtatgcacacaataacgctgattatgccaatacgcttaaagaaattgggctaaatcttgatgacctcaaaatctccgaaccttgctatgattttacgtttaacaatgtgcggttagtctttgacaaacccagcctgttaaatgctcaccttcctttcctcatcaaagaggcatatgttgacggtaagccagtagaattaactgaggataaacgagacgaattaattaattgcctgtaccgattcgaatatgatcaggtatcgcgtggtgtcctccaggaagtatacattattcatgaggggaaaaccatcaaagggcttaacatcattggtgaatgataatggctaactcttatttcaacgaagaacaaaagaaaaagtttctgaacagaaacagcaccagacaaccagcggtcaccaaagtaacagcctcccttgatgctgaaagcgcccgtgacctaaaggaaatcaacgataacacccttgaaagtgcaatcaatacgcttgatatcaaagaagggttgaaatcgtttgaagaaaaattccgtgacaaattcgcgggattcaaagaacaatacgaagaggataaaaaggaatctttagccgaacagctacctgatttcgtcggcccgatccgtcctatatccttaacagatgataactcaaaaactgttgacaatacagtaaacgttaaccaaaatggtcagttcggtaagctggaagaaaacactgaatcaatttttcatgctatcaataaacttgttgatttgtatgaaaatactgataaacataaaccgcttcctgaaccagtggaagaacctgatccgtatgtagacactaagaaaaaacgcatcattgatgatgaagacaagagaagcaaaactctggatagtattgctaaaagtctggtttctattaaagggtttacatcgcagatccttagccgtttcattggctactctctggaagcaatggcaaaatttgctaaatggacgctccttattggttcgttaatctttacattcgatgtgttgcgcgtcacaatacgcaaatggtttgaagatattctgaaagaaggggaatcctcaaaaaaactatttggtacatatctgggtaacgtaaaggcgatcgtaacaaagattgaagaaggtttgaacaacttcaatatgaacaacttaggcgaatcacttcgtgatttgttcgttgagcctatgaagctgttagggcaaactgtacaaactgcgatcactgagggtatcggtcgtcttattcaatcattgggggaatcaactggtatcgacagcattaccaatgccggacgcggaatgcagatcaccgctttacgtgataaacagaaatttggtcttgagttgtccaaagatgacattatcatgatcaagaaacaagaactggcagagcaacaggaagcattggaaaaagaagataaagccattgcagcacgtcaggcattgactattacccctagtcagatccctaacggttcaatctacaaagttgctcctactgattatcaggaaagaaatcagaagattgtcgatgctgataaagaacgtctggatactatgaaaaaacacaccgacgaattaaaaagtcaggtgaaattgattgaaggcagtgcagaagaagcacagaagttagccgatgaggaaaacaaacgcaacagagagcgtgttcgtcaggcacaaatcgaagcggatcgcctgaaacaagcgcgtaaggaaggcaaacaaccgccagaaggatccgagaaaaaaggcgatgacctgttgggtaaagcaaccaattacgccaatgctgaaaatattgatgccgatgatatcaaagacattaacaatatgttggaacagcttgaaaaacgtcgtaatgaaggaaacgttaatgacgtggaaaaggatcgcatatcggatctgattgaacaactgcaaaacaagattgcagcgcgtacagaatcaagctccccgatagatgcacctccaccattagcagccaataaaccgaacgctgataaagcaagcaacattcaggttaacaacaaaactgttaacaacaacgtaactcattcagtacaacgcacagagcataaaccgctcgtagcgctggcataaggaacatataatgaagttttctattattgatgacagtataaacactctcaaaaatattaaaaatcgcggtatcccctctgggggtgccgcaatcacagaatcagtattaaagcaaactatcgttaccgccgaatttccggcccaacgtgcagcaggtatcgataacgcttataacgcttcaagtctgtataataacggccttctgttcactgcatatgattttaatggtgttggtagtaaagacaactatcgttcattacgccaggcagcacagaacccaaaacaaatactatcatctgcgacgggtaatgttaagtacaaacaagtgttgaatagttctattggtactatggaacctgtttgccagatcctgctaccgcgaagcctgaacgataacgaagtaaacagccaccgctatcaagatgcaaacgatagtttcttaaccaaagggttgagccgtgttgtttcaaacatggtatggggcgctgtagaatccgtttctggcggtattatggcagaccgaagagaagcccttgatgttggtactaaagccgctttccagggttccgacaagcgaacaaagatgtattacaatacattcgtgatcgaaagccgtaacgatttgctggaactgattaaaatctactatctgtttactgttctgggatacggtacaacttctggcggtactgctaaagaggttgctgcattggttaaacagtattacggtgttctgggtgctaaaaccgctaacgcaattagcccttccagtagcccagtaacagcgtcagattttgataatagtctgggtaatgatgtggttgatttcatttcgaacgtagaggttattaaatcgcctcctgtctggtttatccgtgatttccagtctggtgattctttgcgtttaccccattcaacctttgggccagcaggtattaccagtgttcggtttgggcgttctattgataatattgtaaatacattaagagaatcaccaaataccccgatctcacttgagatcgaaattcaatttatggaactgatcgatatgcgtcaggattctatttttgatacaaattactaaggagatatgatgttttacaacgtagatgaatttttatcaggtatggctaatcgcgattttcagcgtagcaacctgtttagcgttgtattcgcaaccagccccgcatcacgtatccttgacaacacgatcggtagtattcgagatactttgattgatggatctattagttctatcaacgcaaacaaccctaacgaattcattaatgctatcactggcggcgtgagtaaattgtttagttacactgttgataaggcgattatgtcgctgaacaaaacaggatttagtaaaatcatcggggctattagtccccgtttgattacttccctgtttggtgatagcatgtatggacaactactatctgaattccgtgatgaaatgatgtataatatgggtttgagcatcatgggagttaacctccctggtaaatccatcgggtacgaatacgtttataatggtggcgtacctcaaatcagattcacgcgccctgagaatggggaattgtctttgactttccgcaccgattcagaagcccgtaacctgaaaatctttaacgaatggatttccgctattcgcgatgatgtaacaggacaatacgccttcattgatgaagtgacaagtactattcaggttaacttacatgatcgtgatggttcgccgcatacgacatacgtatttcagaagtgcttgcccgtcaaaatcagtaacagtgaattgagctatgagaacaacaacgaaatctggacatttactgttgattttgcctataaaacatcatgggttgtcgaggctgataaagaaggctgggaagggttcaaacaatccgtagaggaaggtttagccattgcagcacgtaccgcaattacaggacaataaaggggctacggccccttttgaggatcttatgtttgatattattcgagtaacattaccatcagggatcaaacgattccctatgtttacagttaaagaccagtttaaactaatgctgacccgtattgatatggaaggtcggccccttaaagagcaacaggaaatacttgatgaagtgttggatctgctttatcctgggtattccaaaacagaacaggaatacattttcagccgggtgtattgtggttcgttcggtaaaaacgttatcaaggttgtgataggcggtaaaggcgggggccactccgaagccttcatggtgattaatgatattcaactagaaaatgaatacaagctgaatgatgaaatcacattaggatttaacttccctcgtacacgcaatacaagcgaagagttgtttctcgaatgcattagttatgtgatatacaacgagcagcgttatgaatggacatcgctaaccgaagaaacgaaagaaaatattcttgatgtcgttgaactggatgatgtcgaaaaaattgttactatgctaactaaatcggttgatgtgtctatgcgggggaaatcgtttagtggtatgttaaccctgttcaagatcctgtttagtcgtggggatctggatgagtttgtgaagaccaactatctgctaaataaaaacggccttaacctggaacctatcatgaatagtagcccaatggaaaggcaaatttatactgcattgcttgcagaagacttgaaaaaacaaggtgctgttaaatgagaaagcatgaatataaacacgttgagaaatataatgttgattatcgtcctctgacacatacagagtttacccccgacgcagattttatcaaaggggatgtttacctgtatcaaagagaatatcttttcattctggcacttctggaaagtaaaaatattgatacccgtcaactgttcatcaactgtgaagaatgtcaggaaagaatcgaattccagcttaaacgcaatcaaataatggttgaagatttcgacgataagctatacggcaatgacgggatcgcgttatctgttcaccctcgtaagactggtgatgaagagatccccgatcttatcgattacgtaatgatagacggcgaacagatcatgtggagtgattgcagcgacaaagataaagaaatggtattggatgcaatcgactatgcaacctataaatcgatttctaccgccctggataagccagcagtggtcgcaaacattccggtaaggtgttcgtgtgggcatagccatatcgtctctctgagaggcttacagcaatttttaaaggtggtctaaatgggtgtaaatctgaggttgctatatagcgatatagaacctaacatgcaacgagattggaataatgacgtagcggcttcaaaaggggccgcagcagtaagaaatagtttgattggtatcgtaaccacgatcaagggtacacgtccatttgatagtaactttggttgtgctattagtgatatgctgtttgagaacatgaaccctcttacagcggaatctatcagaacatccgttgtgtctgctatccggacatatgaaccgagagtatataatctttctgtcgaggttatacctctatatgacgataacgcggttactgtgactatctattacagtattatcgacgatccggatgatgtagaacaaatcaaactccaactttccgcctcataacaaaaagccccttcctttcggttggggctttcttttagaattcaatgaatcccattagttcttgatatcgcaattcaaacggggagatataactttgcatctggttttgatcggatacgatgtaataatacacctcatcattatcatcatatagcgcttctttgatgatgcaatagcgatcggtttccacgttcacataaagagtatccatgtactttgtaactttggaaccctgtgaactgatttcacgaatagcgttatctatgaaaagcgacaatgcttgcatgaagttatcaaactcaccatattcacagcccataatagaaattgcagtgtattggtgccagcctttgattgtgtctccacggcggatccatccaatttgtctacccccgatagatacacaccacactttaccaacgggactataaaaccgcacaacttcttttaataacagggacatgaccccacattttgtataaggactcatttcaacctcatttcatatcaagtagccaggaagggctagtttcaagcgaaatcgcagtatattcatattttacagtataacctttgaaaccgaaaggaataattgcattttcattgagatattttactttatgctttgcttcttcttcattcagagcagcacagactgttgtttgttcaacgttaccaacaggagaagtaaatttttcaatgatgatgtatacgcagttcatatcgtttccttatttcagtttctttccggttttgagttcatattctaactcacgaacttttattcgtaaagtcattaaacacacctgattctgactgtaaaggtattgggttataactttggttttaaacttctcatcgacttcggaatctttgagccaatcagacatcatctgatacgtagggaggtgttcgcacttctcatcgtctgacatcgcatcatacgttgctttgtccatcgggggcggttcctcgaacgcgagagcgggggttgcgagaagactcagtgcaagtagtaaatatttcataacgtattcctcattgttttcgatagaaccaatatagcaaaaagccccgaccgaagtcaagggctttttcatcaatgcaagaaagatttcacgtactgttcgatcttttcacgacatgtatcaactgaggtgctttccgcaattacggcatgacataacgcctcaccgccgacccagaaactcatcatgtactgaatatcacgaccttccatttctttttgatgcgctttgattcgttcgaaagcattttcgattgtttcagtagcagtaagcatttcggattccccgtcaacctccgccagttccccatcgatcatttcgctttcgacttcttcccagtatactatcgttatcatgcattaccccagtggttaaccgtcgtaatccccgccacaattcacatcgccttcaatgaacagttcgcggttatcacgtaataaattatactttctttcgagttcaggcccgaacgcgtcggcgtcttcataccagctataattgtatcttccgtattcatgatcatattctggttcatcgccgcgttcattgaagtgaacaattttgatatcgtccatccccagttctttcaacttatcccagatatacgaaatctcaacgctatgggaaccgaatgcttccagtgagatcgtaccgtcgctatcgacttgaggaataccccacttcgaacgagtatcatcggtgatcatatctattaatgactcgatattattctcaccgtagatatcagcaacttccttttctttaccagggcgaacaagtccgatcccgataataaagctactgcttgagctattgctcacaaacccagaacgaattttcatcgcatcaccatattaccaatcatgaatagagggattagcgcgaagacgataccccatagaatgaccttatcttcacgacggtcgcacccatgatagataacacctccagcgaaaaccaatacaacaactgaaacgaacgcgaataaagaaatcatttgcgggtatccattttcattgaaacttctttcaggatcttattcagatcgtgaagcgcatcttttacgttaccttcattataggtaagcatatcctggtacagccctttcaagcaacgattgataacatatgctttttcagaaggtaacattgtaccagaacgattataatctctgaaaatgtccatcatcgtgccgttgttgccagataatgacgggttgaagttaaccataccggacatcaaactatcaacatacacaacggttgtgttatcagaacgatacgcgccaccaactttaaaccagttgctgaacacatacggtgattcccgcacttcgctcaaatcggttccgatttcatcgatgtttacacgaatgttgttaaaatacaccgattcatcaatagaaccaggacgccatacgatagcaccgttgttatttttgaatccgactacatcaacctgccagccgttatctgttaaccggacatcatcaacgacgatgaaatcaggtagctgtgaatgaaagccgatgttttcaggacgggaattacgaaacccatcacgattggagaaataaaggatgtcgccttgattcagttcgcatatattcataagatttttaaagtccaattcaagtaattccacaagtcacctcaatgccccctttcgggggcaaattcatcagagtttaacttctttttcttccagaacgattgtgcaatcaaatttcacatctttccagaattccgctgcaacgatatctgttgcggtaacgcttacgctggtttcttcaaaatccagatccgcaaaccatgcgtgtccgacgacaataccgtacattacacgactcaggcgattattaagggcgcgaacctctttaatagtttcctttgtctgcttatcaagatactcgatcaggtcattcttgtcaagcgcttcgatctctttagatacggtatcgtaagcccacagaatgatcaggtcaccattgttgagtttcttcttaccttcggcgcgttttgcaacggtagcagcaacagccggaagtgatgaaacgcctttgattttcacgttcagttctttcgacatgtaaacatcagtcgattctgtgcgctcaaccttcggagagaagccgtaatcacggatcccttgctcagacaaccattcaccagccgcctcaccaaaacgctgtttaagtccttctgcgttgcgtaaaccaatcgcgttatcacggaagaacttcattaccttctgacggcctttcaggatttccagacggacgttatcagcaacaaattccttaccagaaataccgcgagtcatcgaacggttaaccagaggcagagaggtaaagtcaaccagcacagacatacggtcttcaccaattttagccagcggtttgatagtcagaccagaagcacgtaagtttttcagagtcggaatatctgtttccagcggaagtaccttaacgttaacgataccatctttaacaatggtaaagttacgcacttgtttggtttctactttttccggcaatccaaactctttttgtttgctttccggaatggttacgtaaccttgcagatccgtattgatggaaatgttcggacgggaactgttacccaccaggtgtttcactgcaactttcgttgtggtttgggtaaattccggtttccatacttcgtgcgccaccagttgagccgccagtgcttttcgttcttccggagtagaagcatttgcaatctgttctgacagtttatccagtgtatcatcatctttctggacagtctgacggcctgtacgattgtacgcccagtgttcagaagacaggtcgatcactgtgtcggtttctgccagcagttcgagagcgtcaaccagagtaaacgcgttttcatcaggaaccatgttgtaatcaacaccatccatcagacgtttagccggatcaacaaccgcttcggagatcatatctttagcgttggaataatcctgtttggtaaagcagttatcgtatgctttaatcagacgtacatcacccagctttttcagaactttccaggccagatctggattcatggtatgaagcgcatgatacagaactacatacagaacctgttcaccttctgctgttgccggatcgaagccgtcaacgtcattgatcgcgttttcacccagcgcccaaatgtttttgatatgttccggaaccagaacaacaccatttgcagcattcaggacatacacacggccttcatccaggtagatagcatgggttgcatcgccaacttttacttcaacacgtgcggaggtttgcgcggtaatgatttcatcaaatgcaggtacatacgcatcaaacccttcaacgaatttgtgtaacgcgttggttgcttctgccattttttccagaagaggacggtttacataataaccatattccaagaaagcaatgttgttaaacgtcaacggtagagtagaacatgctttcaggatgtcatcagtacgccagcagttatcataaccatcagtcaagaaaatcagactgttcagattgccattatccgcttgcagatcggtagcgacttcaaccgccagttgcagaggttcaacgaagccagtacatccggtcggacgcagataacggtcgatagcatcattgattttgctcaggtcggatacagagctaaccttttcgccaacgaatacagaaccgaactgaccacggctggagaaatacagaatagatacggtatcatcctgtttaaccagcgtcgccaagttgtttttcaggtgctgacgaatgcgcgggagttcgttatacatcgatccggatacgtcacaaacaaaaacgtggttagtcggggttggtttggctacggcgtttttgaattcaatgttagtgatcataattttctcatttataggtaaatttgattataatttcgtttacttttttgctaataatttctaatgcattatcgcatccaaacttactactcaacaatgaaacaaaatcatccatcgttgttgtttgagactcgcctacatcaaaagacagagcataggcaacaggatttttaatccttacgatttgaatagtatactcattcagatcaaaccgttcaagatattttcgcaaagaaaataaatcaatcggtactggtagagtttgactaaacgttatttcttcccccagttgataggggggcatttttacacagatttcgtattccatcagtgatgactcttcatagtgtgttccagattacggaaaatttgcccgtgttcaagctgggattggaattctccgcattcatcagagtaagtaaattcataaatgaatacaccgttctgattgccaaagttggctgtgtactcttcatacaaccacatcttgatcagagcgtctttctcttctgtttccagatcataccagtcacgcccatcataagcaagcgcaattttaggattagaccgatatcgagtttcggcgctatcttcggtttcccattcataacgcttatcatcatagtatgattcgaaaccatttcccatatgaccgcccaggtcgcggtgtacttgctgtacaacttcttccgctgtcgggcaagtcatccaactataaccacagttaggaacacaatcacccatcatttcgcggagattgttgatatcagtcggatccttcgggaaccgtacaataaagctacttgatgaactattgctcacaaaaccagaacggatcttcatttgatttcctcaaattcaaaagctgtgaaatgttttctttcatcataaccaactgtacagcgatgcgttggctttcctgtgaatccatcaaacacagttacacaataataatgcaacgatggaagcagtgtatgcttaatgtacttgatcgcgacgttcaggtcaaccgtggaacatacacaatcacacgtttgctcaaaacggtcatcaaaaatcaactcaatgctatagatattcatgatttgccttttgtttctgatttcagaacgatgttactgtaaggatcttttgctaccagttcccacaggtcgccgggatgttccccgctacgatatacggatgaacgaatgatttcgttaaacttgcttagggcttcgtcgatatcatcatacccacgtttaagaggtttgcggttgcgacgaatgaaaaacatttcttttgttttctcccaacgttcggaatttttaaccttcatctttcacttccttcatgtttttcataaattcttcaaaagttacggggaactcgttatactgttgcgattcctcatcccatacatcgcgttgcccgaatgttgaactttttgcaatgagtttttcgttttcccatacatcaatagtaacatgatcaccaagataagggaaattaggaactttgttcagcgcatcaacacagttttgcaatgattcagaaacatgaacaatttcagtgaattcataatcagcactataagaagctacgtaaatcatcaccaccccctaacgatgctaatcagcagtaaacccaggatccagaacacagcaaccgcacaaatacgagccattactacatttccgcgactagtccactccgcactaagaaacaagagaacaaacgttaacgcgtataaaaccatttcaataacttcggtaatcatataaacctcacgaaaaagcccctttcgaggcttgtttaatcaatgcccgaacacaccacgaatagactctgcgaatgcatacagttcaggatttttagctttcactgtttcgatttgttccagaatgtaatctggtttatatttcgcaccgaaccagcagtaagagaaagagcgatcccacatgaacacattatagtattcaccgttgcgaacttcaaccatcacataaccaggattagaacccagcgggtaatctttcagaagattgaatttcgcgccagcaccagtacatccgttaaacaggtcattaaaagtcatggtatgttccttttgtcagtttcgtttcaacaaggtcactatactattcttctttagcctatgcaagcgcttttttgatttgttttgctattgcttcgatcaccggaacagatacagagttacccgcttgtttgtacgcctgtgttttgctcttatgcatcttgaatgaatccggaaatccttgcaaccggaaacactcgcgaggtgataacattcgagggttcttaccttcctgcaataccagacattgaacaccatccttatagtattgggctgttatcgtcccagtacacacagaatcaactgtaacggcctgatagccaaaccccttaccgtttgccttgtttcgttctttacgctctctaaagcccttccaggcacgatctgatatggtgtattgatcattatccggttcgagaatgtcaccgacccttgttggggtacgtggaggaacaggaaaactaaagaacaccggatcgcgaaagcagacaataaacacgcgctctcttcgttgaggcaatccaaaatcttttgtattcattacctgataatggatatcgtatccttcgtcctgtaacagcctgtagatggttttaaacgtgtttcccttgtcatgggttaatagctggggaacattctcaaagaacagcacagagggctttttagcccgtataatgcggagtatttcaaagatgatagtaccgcgaggatctaacatgccctgttttaaccctgctttactgaacgcctgacaaggaaacccagccaacaggatatcgtgatcaggtacatcgttttcatcaatggcgaatatatcaccctgaatattttcatcgccccagttatcagcatatgtttgttgtgcatgtttatcgatttcagacgttaaaaggcattcgaccccgccgaatgccttatcgaaaccgagcctcacgccaccaacaccagcgcaaaggtcaattattttcatacgtcgaaatcaacctcatcgattttgtatgattcttcgccaatatcagcccatagctgaatattcacgctttttgcatcacgataaagaggggttccatcgaaaccgcctgtataacaagtttctgtaatctcgttaacttccaggcggaggctatcgcgcatgatctgaacaacagcctgatccaatgtaaccgcgtctgggtgtataactttatcgcccaatacaatatctttaacgtttaaaataacatcagtcattagtgccactccgtttcaattccgtgtttataagcgtcaatccccagtggggtaatcactaaacacatatcagtatttttcgttggtgaactaaacgccatagatgcgtagcctttttgaatcagggcatcacgccctgatttactggggacatcgttgaaatccaaatccaacatttttgacgagtatccgtaaagtttacacaggacatcaatttcagcgccggataatttcggatatgtcatttgtagtacctcacaacatgttcagaatacacacgttcaatgaaatcattccagaaatcgcgatcaacttctttcggataaccagatacagccgccagcttttcaacttcacacatcgttgattctagcgcctcttgtacagttgcgaaaggaacaccgccagctttaaccattttcaaaaatgcgctatccggaagaggatacacaatatcaccttctttgaaaatctggatcaattgcataccaccgcgcaacgcatgagaaagagctttccagtcgatcccgttgttggcttctgcttgccgtgctcgttccccgtattcatcccagagtttatacacggattttttcatttccgctacggtgatcgtagactggaatttacgccccagaacttcataaaattcctgacaacctgatttcagtgttttgtctgtaacgaatcgacaaaactcgttggtcgggaatcggttagaaatctcaccaactttgatgcgcttgccgtaattagattcatccacgttacccagcaatgatgtaccataccagtaatcgggaatcatttgtaacacatcaacaacttcacgcagtgccgccaggcgagaacctttaacaccatacttcgccgcttgcttacgaacataaccaaacaggccagttaattccgtagtgtagaagcgcgaacggttagcgcggagatattgccagatatcagagttagcgatcagcttgctatcatctgcatgaagcatatcaatcgccacggtatcaccatcacatgcgaggctaataaacttttgcagactgtaaatctgacgatctacgtcattaacatcgttctttgagtttttatcaccagttgatgtatcgatagacttcttcgcagtgcctaacaggatttcgcgaggatgagggagatagatccctttgtagtctttatcgcttgttggtgtttccagtccgtacaggtgagaaccgaatacggtttccataatcattttcatcagaattcaacctttaatgtttttgcgatcccgcgcaattcagcggtagtaatatccggaatgtttgttccgtagctattcccaaatacttttttaatcttatcacacaaatcgcggcgatacaccatttctttgtattcttcttcgctacgatacagttgataacccatccacccctcagcccatccggaattgcgcttgattttaatattagtacaacaatcagacccatcttccggtcggaaagatgcatacaggtactgacgcgcaactttttgtacgtaaagggttttggggttgcgattttgtcgctggtcactacggatcccagcatcatacaacgtatcaccaactttcacatcacttaaatcaatcatttacgtctccagcaattagttttttcacagtaatgaacgggaacaggcacacccaacgtttctttactgcttctgttgtatgttatcacaacgaatcggttttcgccacccctaacacactccagatccaaaatctcgcgggttcccttcgtgttaatgtctgcaacataatattcttcgttgttgacaatcactatatccgacataatcaagcgaggtttcatgcagcgtacacctctgattcatcgacccattccagatcctgattgagtgattcaatcagctttttatcgcgtcgggaaatgacaacggtagaacctttgtcagctttcacgatgatgtcaccagaagaggtgatgtattcaaccacataatcacggcgagggcttccgagtctgtcaccaactttaacagcacgtctaaccgattcatgagatttttcggtgaacactaatccatcacctacatgggtaacaataccatcaacagcagaacgagaattaacataaattttgctaatctccgccatgaaaacactatctctcagatatcgagcagtcactttatctaaacactgagaagatactttatctccgccaggatatactgagataatcattacatgaccctgaacacgggcggttcctactttatgcagaatgtaaaccattgaaccatcagaatctttagatacaaggatcacgctgaaagattctttgtgttgcttctgagtttctccacaggtaaaactcacgtccagaaaatcaccaactttaacagcacggggttttgctacttgttcacgagcactaataacagggatcataatcatttcctcacagtttcaaattcttcatcagatttccaatatacgttaaaattacgacaatcgtgttcggatgtcaacgtatatttttcatttgttttctcatcggtgataaccatagtttcattatcgattgagttaacaccgtaaacgaaaacattctcaccgcgtttgtttaaaaacgcatcacccttttcaatcaactgccaacaggcaacaggcaacccacctggacaaatcggacgggtaacaagacaatagggatgtttcataataagcctcttttgtttctgtaggcccaatatagcaaaagcccctgacctaagtcaagggctttgttttaaattccggtaaatgctacgatgatttgataatggtcatcgaagaatagatcccgcatcgcgatcacttcgtgcatcggtagccagaacgcgtctgctgcatcatcagagccgcccataatacgaggtaatgaaccatcgttattaggttcgagcttgatatactgtgctacagtcggttttgagaagtacaccgaacgtttcggatgatcgaacagcatcgaattacggatagaaccacgaataaccttttcaggtactttaattcgtacttcttccagcagttcacggatcgcgcaatcaaggaacgtttcgttaccgtttttgtgtccacccggaagcgctaacgcatctttaccaggcgcaaacttacgacggattactaacacgtggttattacatacgaccaccgagtcagccgtgcaacagttcagagaatccggatacggatattttttgaacttgtcaatctctcgttgccagtgtgcatcttcatgggacaaacgctggaattcttttgtttgtgtccattcatcgataaaggaaaccgtagtgctaggcgcatattttaacaaatcttcgtcccagccttcatggtgttcccagataattttgcgtaaattggtcgaggatagatcctgatctccaaccttcacaggttcaaccggaatatgattccatccgaatgctttaagccagtaagaatctttgtctttttcgtacccaacgatcgcaattcgatcatttcgagtttcatcgattgccatacgaacacgggatttccatttttcctcgttatagaggtaatccggaatgtgcgcgaatttgattctggttgcatcttcaacatcaagtttgcagatagaccagcgagtgatcattgcttgacgctgtttagcggtcaatgggtttaatgtgttcggatatgcataagcagaaccgatcagaatgtaaaccgtatcagcaacagcaagggcttcccttaccattttctcatgaccatagtgaaaaggttgaaaacgtccaattactacagctttatcatatttgtgtttcataacgtgctccacgtttaaaggttaatcataaaacagacgcaattatcaacacaccaaacaatccaccaatgaaaccaaagaatagcgaaatgattgtagtcagtacgatctgttttatgttcattatagtattctcgttttagatgtcaagcccccaaagagggggctttaaaacattatttacgagaatcaaaaatcactttaccagcataatccgaacccattacagtttgaggtacgccacctttatagcgggtagagtagttcatctgtacatccagttctttccagcggatcatttccggcgtaatggtacgttgcagcgcggcgtttgcttctgcttctttcttcgctgcatacagacgggcatcagcatcacgttcgttagcgattgcggcattttcacgggcctggcgatcagcttccgcttgttttactgcttgcaatgaagtctgttctactttttgtagttcagctttagcggcgttaacctgttcttcgcggatcttcgtgttagttacctgttccatgataacttccggcagggtgatatcctgcaagaatacctgtttcacggtgtaaccgtaaggccgcgcataatcttctacttcctgctgaattgcaatttgtagttggttttggatcttcgcatcaaacaggtcttgcgctttcggtacggatttaccaaattcgcgaacagtggaaagcagtttttcagttacatacttatccagtgcctgatcctgattacccgcgttgatacggttgatcggtgctttgctaccgtcgaattgcagcattacggtcatatccacagtggatttaaatttatcctgggacggaacctgtaatttgtcgaacttcatcgcgatgtctttggtgctgaacgtgtcaaacgttgccagcgggtttacaatgtggaaaccaggcagtacgggtttcggtgatactttacccatgaaggtttcagttttaaccgtaccgtcttgcacaatggtatacatgttaggcactaaccacagtgctgcaactacgcccagagcgatcagagaggttttcttcgggttgttcacgatagtgtttaagttcatcataatttccataagttgttgttcaattcgatagttattctatcatcacatttcacgctgtcaaactattttcaagaaagttttgtcagcttgtagattgtttgatagcacaagcccttaatctcgtccaggatgttcttcaaagaactatctactgattcgtagatctcgtttgcttcgttggctattttacggagatacgctaccgtgtcaagcatattttcggtttttagcacaggtttgtatcttcccgtgattcctatgtggatttcggtgaatttatcaaccaaatcctgcatatcttcgtaaaaaccctcatatgctttatgttgtgagtaggaacctgttgcaaaatgtgcgctatgcatatacgtaacggacataaggcacatgccaataaaggcatctatcttgcttgagttctcagattctgtaatttgtttaaatgattgcatgatgatccctttatgaacgatggatacttgcaaactcatacgcgaccctgattcctagctttgcgcattcggattcagatcggcattgtttttggtgccattttcgttccatgtagttgtagaatagttcgcttgtatttacgctgggagggatcgttgtgatgtatacttgaagggccgcattaatataatcgtcaaattctttctgaaccggacggtcggcggcgtgtgttgtgggtgtcatcatcaacaatccgaacagcacagccattgatatgcgtttaatgttcataacaattactcttttactcatagacccactataggtctactcctgtatatatttatagcaaaaacgaggccaagcctcgttataatatttttgctgtaaagtcaatcaagtaatgtcataccaacacaaacttctttcgaaagcgcgtattttgttcacgttttctacgttttcgtcccaaccaatcaccccagctttcatacgtttcagttcctgacgtaaacgggtacgtacttttgaatcaattttctttactgcaatagaaagcattgcattcagatcgccatgagctttgttaccgtcgcgacacagattattatcaaatcgaatgtatgcacatcctgatttgtgtttccagttggttgagtaccaacgcaacccatccggatcaataccatgttgagcataataacgagaatactcttttacttcttcgatcttttcgttagatgaacggtcacgaagaggattgtatttcttacggtaagtgcgactcataatgatctccttttgtttatgcttccactgtatcagggttgttctttagttgcaagtagtgttttcgacaaagtgaaacatatttgtcttcggccccgatctcaatctggtcgccattagcaacaaatttgccatttgcatcaatacgggcaacggtagttgctttctttccacaatgacaaacccctctcaactccctgatctcatcagcaagtgccagcaacatataagaaccttcgaacaagttcaactgaaaatcggttcttagtccatatgtcattacgggtatatctaattcgtcaacaacccgacacagatccatgacatttttcctggaaaggaattgcgcttcatccacaaacacgcaagaaaccagattcgggctatcactgtaaaaatgattgttatgaacatcataatacaagtccatatcaggagtaatcatggtgcatgttgcttccaacccaatacgtgaagagatactctgtttaccttctcgcgtatcaattgctggtttgtacatcaggatccgcataccgcgttcctggtagttgtatgcatcagtgagtaaacgagcactcttgccagcattcattgatgcataatgaaaatatagtttagccatttatcctctcaacaaaatctggggtattttgaaatttcccttccccttcatggtttttgcatgttttgtttgaacagtagatccaccaatcccactcatcataagggggtttggtaatgttcattacacaaattaaagggaaatgacaatctctacatctagcgtgttctataatggttgcgttatccatgcgcgtaaccgcccatttcgttatcttgtgcttgatgaatatcaagataccacatattgattttacttttcagttcgtccatttccttactcagacaattgtcaacgagacatagaacattaacagtttctttacgttgcataacgtcgatgttattcgctttcatcgcttgcgccaatgcattacaggttttcaccagtgcggcgcgttgtcctttgattacggcgatccgtttgttcgctttctttattgcccgtccagctttaataggatccatcatgattaattcgccttacgaggatcgaaatgaacaacaatgatcgggtaatcaccagtcacctcattaataatgcgcttaatgagttcccagtcgcccccagcgaggccagcaccgattaaaggtgtgataataggctttccagtcttaacggcgtcagcaagccctacagcctgtttaaaagcattgccgattgcgtcataatcgacacgcggcccaggtgtccagaaatcatattgagtatatgcattgaaaacaatgttgcctttttcgccaatgtaaacagaacaagttcctagcttatcacgggaaccttttaacgtattggcatcaacttgaaatgcaccaggaatacgatcgcggatttcgcgagcaataccagcgcccatattgcaataacagttgcatccgtggatcaaatgaccttcaccattcagatacatattgacagcattacctttcacttctttaatgatcatttttattattcctatataattcgcgttcgattagcatatcgatgaaatcagtaatatcatcaaaccaatccttagtttcttgagcatgagccaaatcaccatcatctaaaaacttttcgcgagcatcagcaaaattatctagtttgttatagagttttgctttgtctatatcattcataaattaaccttaattattaaaagaacgtaagaaaaatacgtaatgtcaaacctgtttacctttccgttcacggcggcgatcttcttgatgacacatatataaaacaccaccaaaaattataaaaccgataacaacgcctataaagtatccagcactaaacatagtcatcatccccgcaatagtaacaaggcccagtgctctcatgcttaccagcattgtacgccaaaaacaccacaaccgccgccataataataaaaatccagatagccattagtaaagccctatgccagcattaaattcatcaaccaaataagtacggaacttttcacaccgttccttatttggcgcttgtttgcatagattcatcattggttcagactgcaaaaactctttttgtttcagcaacttaccgcgtttatacaggtgagcattttcctctccccacatataagcaacatctaactgttctgcgatcacttgcttacataccgcgacatctttgatatcacgattgttgcataactcatccaggcgagcatcaccagcgtgagcaaatccagcaaccagagttaaaagcagtgctaactttttcatgatgattccttattcatcctcttctataggggtataataatgcgcattgcagatatacgcaagaacttttttcagagacatatccgagaatgtcggatcttgatttcgtctcatcccactaccagtttcaacagcccaacgtttgttagctggattgtatgtcagccagtagcaatcccattcagacagagtatgttcgaacagatcgaaacgcttgcgcccgtttgcttgcggtctaacaaaaggttcgaccatttctaaagcggttaaaactcgattaatgtttgaaccgtcttcatccatcgcgatccgcaaacagtattggttaatgtccggatccataccatcgatacccaggccgatagattcgaaaaattttgtagccgcgtgataagacacactagaagaacgatattccaacatcacagggatcttttccccgtccttgacgttgttaatgatatcctgatcgataagttcaatcaggtctcttttctccttgatcaaggtagaaatttcttcttgcagcggggctatcttcgcatgaagttcttttatccgttgatcaattacggacacttcgaaagctaaatttctcattgtacccattccccgtttttgtcaatatacatgatccaatcagcaaccgaccaatgggaagtattgcctttcggagtcgctactaggtaggaaccagctttaaacagtacgcgtttagtttcgttcagaatcaggtcgctcataatgtattcctcatttaaccaaagtgaatcgatattcgattgcatcgttcgggcgctcatacacagtatccgaacttgtgataacagtatacacggcttctttcacaagatccataattttctgtgagtttccccagacattgatactaaaatacaacccatttttaggaataggattgtattccatatcataatatatgtccataagttcacaaatgaacaagcggcgctgttcgttatcatatgtaaaataaatgttaaaacaatcgagagatttactcaaagtaatctctttgataacgatgttatcttgtttgctaaaatgatcgcggattgtttgtacacaacgcaacagattagggtagtcatatttttgtgaaacaatgacttgatgtgaaacgctcataatgtattcctctcaattagatgcatccataataaaaaagcccccgaccgaagtcaagggctttttgtcaaatgatttgtttttcttctaacagcttcgcggttgtattaaccatacgagcataatcacgggcttctttctttgtatacttgaaaccagcgttataactcgccagcgcctttttcaagtcgcctttgtggtaatcaagccagtactccagttcatagatcgcatactttgatccaccttgaagagtttcgagctttttgattactacgcgtttaggatatgacttatccattcgtgcgctggcgctacttgcggtaacttgccagcatccataagcgtgatggccttttttacctttaccgacattctcacatgcgcgagactcgatccaggcgatagccgctaaatgatagcctaaacgtttagccttatctttttctacaggttttgcagtcttcaaatcatagttgtgtccaactcgataagcatactccaaaacctctttctgcttcggtgtgatgttctccaaatccttgatgtaggatggagaatttttgtttgccggaggctttacagtagccttttgtaaaggcaattgatgagtaggcaaatccgcaatgaaatcccctagcggatccgtcgcagcgttgccagaaaaagagcacaagaaaatgctggcagcaataataattttcttcattttaatacctatgttgcaaaaagaggggcaataatacaccccactttatatttatgcaactattttagatagttttcgcgtcgcgtagtttatcggtgataaactcagcaatgttataatttgaaatagccttgttaggatcgtatagtgcaacgatttcatctattgataccataacggcatgtttaaagtagacgctccagctagtagtaaagatttctctgttgtcaaatccacaatcagggctgaacaaagcgcggtatttgtatccactgtatttcgtcagacgattcgtgctgtgcgcgtcactggtgatcagaaattttccctggtgagtttgtatgacgaaaaagtatccgagacgttctttgttgtccagcatcttttcaaatttattttgcgtatcttcgcgaacaatacgagaagtcagcatttccaacactttatcgtattcgggccaatcattctcgatcacgattgcaccaaatggtttcttaccattgatcccgcgcccgatttcgattttcgtgcaaatttcgttgaacgttttcaaatcttctggcgtcagttctttaagatcgctcaattttgctacataataacgtttttctagttccattttacaattcaacctcgtttttacagtatacgcattcaataaaatcaacttttcgcatattgaagaaatatgaaccctcggaagatttttccttgtgttttacatcttccttgtcatatttcatggtagtatcacaacaattgcacgtaacaatacgggattttgcatttatgatctcaatcatgatacacctcaattcaaaaataatttcacagagttaccacatttaggacatgtgataaattttttcacgacataatcagcagcagagaaaaatccattgtaaaccgattctctcttttgctctacatcagatagttcatactctaacccacttttacaacaattgcaaacggtaattagtttttgactatggatgacagtaatcatatacacctcacaaaaagggggctttcgcccccatcattagaaattgtcttcgacaaacgccgcgagacgggaacgatacactgtatcaagaatgatatggcttgagtgttcgtattctttcagcttttcaacagcccatacaaacccgttgtttacggcagtgtttcgagggttgtcgatctgcttaatgttcccgcatagtatcagaagtgtgttctctccgcaacgagaaatgatagatttaatttcatggttgctaaggttttgacattcatcaacaatcagcacagaacctttgcccggatccggatgaccaatactgcgaccacggaaataatacaggctagggaattgcaccacccctttttcaatcaaaccttcaatgtatttttcagattccggattatccttaaacagaatgttcaggctagtaatacaaggttcgatagaaggccggagtttttcgcccagtgtaccaggaaggaagccaatttcacttgataacgggctatctgacttcacatacatcaagttagcgtaatgtccactattaaccaggtgcatagcaccggaaacagcaagcattgttttaccagaaccagcgccacccataatggtagcaacatcgatttcattgctcataatggattcgacgaaagccgcttgcagagaatcacggggctggatagctttcatgagtttgcgtttcatcgcctgttcgtgcttaacaggtaagacattcaagcaaatctcatcagcagtcactacacgcccgactaactcaccattagaggtaatgtactggttaggataaaaatcttcgtcaggaagcgaactgtaagtgatttgggctacattatccgtatatcccaacacttccacggtatcccaaaaatcagggatctctacgtaaccggaatacaatacatcgctatcttttaacgtatcgtcgccagtatactgttctaccttacacccacgggacattgcgatcagtaacatcataatatcgcgagtaactaaggttgcatcctgttgcatacaagtttcaatgattcgttcgtcttgcttgtcaagagcaaacgttttgtttccgacataatcaaccactttaagggtgatagtgtcagacagtgctgggtttgtcaggtttaaaggaatacctgatttcgtaatcgcatcatatgactgaccgaaaataacttttgacagaagccggatcgccaatcgtgcttcgtgcgctgttcgttctttcgttttcaggtgatctaattcacccatagtagcagaggtaataatgatttctgtaccaggttgagtgaatgaatagattgaataggggttcgagactaaaacgttagtgtctaaaacatatttcatagaaaattcctgatttgattacggggtacgcggattcgcaccccgcgtactgcaatcacatacccagcgaaattacgtgaatatatgctaatgggtgtctcttttgtacacaatgcatgattgtattatatacaatgtccatgcgttcactgtgtgtaagatcacactcatcaaaaataaggtttattgcctggtgctcgattcgacgtccacggaaatgattaagaattgcccctctactggtcaatacatcacatccggtagcatcatttaaccgtttggcttcttgtgctgcatttaacgtatgtgctacgtaaatgttaagggaactatcagaacgtttcataaaatcaaacgcgcctttagtcttttgcgttcgtctacccagatccagcctggtttcaaatactataaaaccactagggaagtaattatgtgttggttcttccaactctcgcataagatgcatcttacgacattcttcaattgtctttacataaaattcactattcatgttttacctttaaggggccaaagcccctttgttacgctaattccacatgcggggcatcaatgaattttgtttcgatcggaaggttcggatcatttttccagttgataccaaaacgcagtttaacacccagttcatcacctgcttgtttaacagcattcaggacaggcaaccacactttagggtttgtttgccagccttgaggcaacacgctaggatacagatccaccgcatcacccgtgatgtgttttgagttcattgtttgagatacacccttacggacgttctcgcgctgttgttccacagtacgcagaccttcacgtacaccaaaatcaacaggagacagttgcagagcacgttctacgactttcaccagttgaggtttaacgcctttaaggttgttaaggcttttttgactgaatttaaacataaatcacctcttgtaaaaataccctgtttgggtacacagggtatttatggtttaagaggttcgataattaattagtaaaggtcaccgaaacattcgtcatattcacgtttacgttcgatttgctcgtttctacgatcttccatatagggaggaagacggtcttcattgacttcatcaatgtaagcctgtgcatcctcttttgttagaaagagtgcatggaagttatatccgttgtacccgtccatactgcgatctttaagagagaattctgtgtgataatcccagtctttgtacagggtgatacatttagcaaacagcccaataccgcgatgaatgtatgggaatccagtaacaatcatcttgctacccatttccgcattttctccgttcacacagaatacttcatacatgatcgcgcctggtttaacatctttcttaacagcacgtttttcaaaagcacttttcataatatattcctctcaattggtgtaactacagattactagtttagtttctgaatgtcaacaaggtttatcgttttttgacggaaaagttagagtgaacaaacgatcatgaaggttgtcgatccgttcacaagcctgtttcagtatggttttatcaccatcatttgttgtttcaatgcatccaagttcatcagcgtcaatgttcactacatcgctcatcaaagaagcaaacacgttagcatcaggatgtaacagttcttcaatttcggccttcatgccgtcgtgttcagaaaggatatcaataatatcgcgggttaaatccccctggtacgggaaccctgtttctaaatgattaatgatcctttgtgctttcgtaatcataattttacctacaaaaaagcccctttcggggctagttaattagagttcacagcaacggcacacaccgtattttgtaaatggagcatcaccgctaacgtaggcccagaaatcacatgcttcttcggcagtatcgaagattgcagcatcatagaacccgtgggcttcgttaccgttctcatcgatgaaaaccggagtccagatattaggattgaagcaatcgtcaacaacaacccaaccttctttagctttcattgcttctttgttggcttcgatgtgagctaagatttcgttcatgatgtccatttttctctcctaaagtgcgtttcgtttcgacagggctatagtctcataaccccgtatctacgtcaacacttatttgaagcgaattgtactatttttgaaaaataatccagagcacacagcaccttcaattttcacccctgtagggcttttagcaacgaaccctgttgcgtaggtgtctttctcatcacatgcgaaccaggcgcggcctgtgtacgtgatatcggtaaacccgttagcagtcagaatacgttcggcttctttctcatcggtgcatccagcttgtgctaaaacgacaataacgactaacaccaaagcaataatatatttcatgttaaactctttttaagttggttttactggcttcaatccagtaaacgggatcagaatagttaccgcacatacccagtaacacagttgtacaccctgaatgatcggaaggtcgcaatccatcaggatgaaaaggcaattcgttaacaccgatactggtagcaaaaagagcacctccagtactgtaaaatgttttgatatgatcgtatgcatcatcaggccactgaaaacgataagttttattgtcaatggttactgtatacatatcatattccgtaaacaacggatcttttccttgtgttgccccatacagagcgccgcgccattcaaccagatttgcttcaatgtcgcttacacaaatttcgttacccatacgcaaatcatgaaggatcccttcaatggtacgaatagccccactaagttcattagttaacatagagtttcctttaaatcggtttaatggttttcaggtgtagtttagcataagaagaaccaaatgagttaccattatgatcaaacttatgttcttcactcttccagtatttccccgatttcatcaagggtatacgcttcttacctgctgttatcgtttcaaccattccggtatgagtgaatgtcatgatataccctcttctttcagcacttcccagatcagtttatcaaggtgcatcaggttccacataaccgaatcataagaacccagtgagcgggagtaaatcactccccatgaacgataacttttctggaatgcttctgcactatctacatcatacggcatatcatcaccggatgcaatcaaaagtttaaggatcatcagactgttcagaagttttgaactagcgtcttgtgcttgtacttttgcacaataattttcaataatcgcttttgcctttggttcggtgatgcgtccatttttgcatcgctctttgtacacatacataagttcatcgattatttcttgcatacattctttccttctgttctgtgctcatgccatacaactgagagcgtatacggtcttgtatacgacgcgtttcgttttgcatcagttggtttgaaagaatcaaatcaaccaccgcgccgcgaactttccatagataatcaatcatcgccatatcttcatcagtatggaaacccttcgcatcacattcatagataatgctttgcctttccgccattgccatttctgctgtcgccggagtagccagagaatattcatacttctcgatcaatgattccagtgtacgtggttttacgggaatgtcaacagttattggacgaatcatatacagccccacttatcaccatctgctttaatctgtaaattagccaggaatgaaaacataatatcacagttgctttcgattagatagcgatattttaatacggtacttacctcttccggttctaccgtagtgaccttaatgtctttagcacaaagatcataatcgttacagtacccgtcaatatccataagcgttttgttttcatctggatataattccagcaaatacgcatcttcatcagttaccagcgcaactatccggttgcgccttgtgttataggttaagatcttcatttcaattccaccgcgtatacatccaattcaggggctttgtgtacgcgcatatctttaccacatacagcataagccggacagttacggcaaccattatgatccttattaccgatcaattcctgacggaatttcttagttttcggatgttcccagatatctttgataaagtcactggcttccagtacgttaagcccttctgaccatccaccctcgacccaacgttcagtaaaggaacaagggaagaattcacccttctcgttgatgtacgagctaaacatagttgcttcgcaatcttccgcgtactgtttgtattgttcaaaattttcatgcccttccatagcctctacaaaggccggagcggaacaggaatcaaaaccgaaccctacaccggattcaaggcaataatctaccagcgctttatactgctcgcgtgtaacggtatcccagttcttcccacgacctttttgtttcagacccaggaatacgatcgcgttaacttgtttcaagcgcggatcattctttacagcatcaaccacgttaaacgcgtcatcataggttttagagctaaccatgaaatgaaggttgatttgctgttgtccggcttctgcaagattagccactgaattaaacgctacatcgaatccagcatgtttgtatactgataccgcaacagccccagcaacagccgctaaacgcgctgcaacgtcttttgatacatcagcaatggtaaggtttggtacaatgcctttagaacgcgcataggccatcatatcaaacatatcagggtttgtttgtccctgtgcatcagcaccgagggcgcattgtgttaaccagggcattttatcaatgatagatttgaatgtatcaagatccatattgaagccgttagggttattagacttgtagcaaaaaccgcaaagtttaccagcagggccattgcatttagttgtgatctcgatatcgagaatttcggggaatggggcataggtaggatcagtttcgaacgatgttccccagcgagcaaactcaccagttttaacgttgaaattgtagttataccacttagagcgagcgtaacggatatcaccatcttgatagatgaacagggtaggagctttcagaacagtttgtgcgttattcataatataattctcaaaatctaacatgggattggaagacagcgcgagcgagactttcattatcaaacggtattgattggtgttgtcctttgctatcaatgttaacgcgccaaaattcactagaacaattttcagtggagtagttcaacagcgttaccgttttattcttttccaaaaatacgcgtttgtcaatctctgttttgattacatgttccatcattttacccaccgttgtttgcgttcgtcagccagttcttttttgtacaccttgatgtattcgccgttcaaggcacggagatttgaaaatacacgattgaaaagatttttcttttctttgtatgccggagacatacggatcgattcaatagtcatacccatttcatttttaggatacgctcttaactctgcgccgatctcatcgatccatttttggtacagatcacgcttttctttgtactgttcaaaagtcaacatgtccatttttttatccccgtttcgtttcggtatgggtgtaagataacatcatcctacacccagcgcaagagttatttgtattccatgaagaattttattgcttcttctggcgtcataccgtcagagaaaaatccaaagaaagtacagtgatggtcgttgtatgaaatattcaaaggagatagtaaacttcgaacatgttcagcccacaaacgatattttttgctgaatggttgatctctcattcttcgtccccttgtgcgtagtattcacacactgcatcttctggggtgcagccgtccgagtaaagagcatacatcagatcttcgtcataatcagaagaacccagcatatgttgaacagagcgtttccatttgttgtaatctttttcgcactgggtttcgctgttttctgatttaagcatttcgtacatgttcatagaaatctcccgtagtcggttacagcatcttccggatccgcatcaagttcgtacagttcgcgagctagggcgctgggtttaatatcgcgccctaagtgggcgctaacattacgtagccatttcatatagggttcgaatttgttcattttatacgtaccgcgttaaaagcctggttccggagatcatacgctttttcaagctgttctgtagtgaacagagaactatccgagtttaccgtgaaactgcaaatggttttgttgtcggcgttgacttcttcgacaacgatttcgtaaccccagatcccgctgtactcacatttcacgttccggtacttgatgtaaactgctgcaacatcttcttttttgtagttccggcttttgtagatgatttccatgatatcctccttcgtttcgatgtgtgtaatataacagaacagggttatcgagttttagcaattcgtgctaattatgccattttcttagcgattttccaggaggctttgaacgccggaacatcttcaatatcaacccagaaaccagatccgaaaccatcactgtagcaagggcaaccatcgcagtagttttcccaggtcatcacttcaccaccaacagaagcaccagtttccatagcacgtaatgcatcttcaactttttccagtttttcggcgttgtcgtcgtaaatgacaaagtaccatttaccgttgtattcgttacccagtttgatagcttcgcgaacaagtttcatgatgatttcctttttgtctgtttcgtttctatgtgtgtaatataacaaaacccctcaccattggcaaggggtttttgcaaaaattatcgtttgattggggtattatctacaaccctttgaatttccgaacgtatcgtagaatactgacacaattcggtaagcgcccgatccaggtgcatcatagcgtaaggaaaatcttttccgcatttgtcacatcgagcgtataaatgtaaatggatgcgcccgatcccatctacctgactatatttctggaatatgtaaggttttgcacctcgatagccagtagcttcatgcttacactctcgttttttgaaccatgacattaataatatccttgtacgttgaagcggtcacacaacaatctacgtgtttggttagtatcgctttggatagaatgcaacatagcgctgaacatgtttaggttattttgcatcatttccgcgctcatgagaacttccatacgcgcacgtaagcgtttattttcttcttccaactcaaccatacggtcatatgctttgatgcgctctaagggcatatcaggacgctctttgagtacgcgagcacgttcaacctcacaagcatgatttgctttccagtggttcgattccgcttcaaatttattaaggcggcggatctcttcaaccagctttttgatcatgtgtggatccatcatgtcgatgaatttcatcaagcaattggattttgtttggttgtcagcaacagaccaagacgaattatacgtaaccgtaaacgtgcggcccatttcatcaacaaccccgatcttgttatcatcggtgattgtagccgcccatttctccctcatggctgtacaggttccgctggcgacactatgcaacttgtttaatgttgcgtcatcaaacacaatttcatcactcatgtatgcctcacatagatttcaaaatacgcagaagtgcgttagtaaagatatcaggaacacaaccaccaaacaacttatgattcatcagcgctaatttcatgctgtgattttcagtatatcgcccgttatggatcccccaggcaacgacattaccaggttcatgaataactaagttagtgagagtaacggtcatgcgctctttatcattgatagagaatgaatagcagtaaccggatccgatgtcgccgtaaaggttaaggtctttcaatttcccttgctcatgcaagcgtttcatatgaactgcacatgcatgattaatagtcatttcgtcatccctagcccagtcatcaataccagaggtataacgaatattgaagtagttagtcagttcatttgatacgctcattagaaacctcacttttataaaattctttaccagacccattacagctactgcatttgggggaacggttgttatcataccgccccgaaccgttacatgcaacacatttccttaatttccagccatacacgaacctcatgtaataatcggttcgtgcggccttgcgttcatggaaattcattcgatttctaccgagtaaccttctttacgtttttggtcagcgaaatttcttgcgcctccccaatcgtaacaggttctacgaccaacttctgaatcattatgaaaccaaatcacggtatatcgctttcccataataacctcttaaactttgttgtaaacctgaaccaaccacatttcgatgttaggcgcgtaagtaacgtttaccttatgcattgtgcggtatttgtaagcggctttgtatgcatcgagttcagtcggaacacagaaagagaaaccgttgtcatagcgttctgcgttagaaacttcacaaccaactacagcggcaatgtttttattcatgttcatgatattttcctttctctgtttcgtttcgatgtgtgtaatataacaaagcccctgcactaatgcaagggctttttgattattttggtaatttttcgattgttgctttcaactcattgattttattaaagagttcatcgctatatttcatcaactcactacggcgtttttcggcccacttgatcaggaattcaggagaatctacaccatacgtgtaaccttctgcactcagttgaatacgagcacgggaaccataatcaacagaactttgttcaatgagaaacttaaccgcatcaagcagggctaaatcttcatgacttaccatgattccttctgcctttggaagatccacaacttcatcctgaatgagttcacggcgggttgtttcttccagtgtttcatgattctggatcatcgtttcgaccggatcctttgccacggctggtttgttttcacctacttcttccaaaaacatcaacatccatccaggaattttagtccggaaagaactttgtacttcactggtgcatgaatttcccagaatgtggatcgcgttaccatgcatatcagctttattgatatagataacgttctgctgttcctgtcggttgctaccataagaaaggaagcggcgtaacgatgtgttatgaccatacttccctaaatcgatttcagccaggcaatcaatgatcccacggttagaaaccttgtaacgcttaccctgtttgaaaaataacgattcttccaggtgagtaggggtaaactcttcataaagaacatagaattctttaggaattttgcgctgaaccagactcagtttacaattattagaaggaacaataacagagtgaatgtttccttcggtatcacacatagcttgcattacttgcggatagtaaagatggtctttcttgcaagtatagctatggatacgactctgacgttttttgaagtaccatttaccagtttcaaaaggcgctgttgtaaaattcattttgcattctcatacatagttaaaattgcttgcatatgttccggtgattgtggaacccctgcaaagttcactttcaaaaagaaattcaaccgatcttttatgttgcactcatcgagtccaagcgctggcaatgaaatgttttcaaaagcacgttgttcatgtctttccatttcaccccaaaacaaacgagaaccgtccggcatcggtattccaatttcattgttccagaatttcatgatagttgtcaagcgttgttttccatcgatgacttctacccatcgagattcgttgaattcgctatcaactgcgatcgcaatgataccacaaggaaaaccagtgattaacgttttcatgaaagcatcttgctctttctgcttccatacgtagggccgctgataggacggattcagatccaaatcgttgttcttgaaccaatgaatgtaactaccaaccatgatcgcatgatcgcgactttggaaagtttttaactcccggatacggtttcttacaatttcatcagccattatacaatcaccatccagtatataatcgtaatcataaccgctacggtgaaactcattgcagcatacacccgcgcattatgaacctgtgttttcaattccgcgatctcttgatccttttctctttcaaactcttcacgagtaccataatacccaggatcattggcagttgccaatctaaccgcatctttttcaaccagcgttgcgtaaccgctttttatctgtgtcgccccgtaccatccaccccgatcgttgttaatgatcagatgatcgcctttttcgttatgttttgactcaccaatgacaataacccgtttaccattcataatatgatcctcaaaggggccgaagcccctattttgcgttcttctgtagataatctaacagatttccactttgatgtaaatcaacaactttagaaaacttctctgcgtttctttcgtttgtgagttcgtcgaaatgccatacaccatcatcagctattaacgcgccaggtgatgaacctgtttctacatcacgggaaagcgcaagccccagagggtgtaagatttcgcggttaatgcgccaaacaaggcccatttcagatagagtattaaaatcgacgtatttcatattatgcctttggtttcacaccgtaggccaacataccgaaacggtgatcgttgtctgcatctttaaacagaacttcgttaccatcaatgcagataacctttgcttccggatcgatgtatggaagcaaccacaaagggatcagacgcagaccgctatgttcatcccagcgactgaaattaagttcttccagttcatcaagggaaagctcattaggatcgatataacggaaccatttggtatttttgaggcgttcggggaatgttacgatttcttcatagccgaattcagcactccatgaagagtaaacagtgacttcggatgctttggttaaaacagcatcgcgaattgatttacagatatcgattaaagtcagttgattttccatgatatatttctcatcttgctaaaattttaggcaatagttgccccatcgttttacgtgcatgtgacggaatctgtgatactgggacatacttaaaatcatccatttcacgtatagtccgtccgttcttaacgaaagtggatgcacaatagcattcttccgctactgggtaatcttgccctacatagaggaataaagcaaggttttttgttttcgtgtaatcgagaacacccaggctaaccaattcctccgcgaatacttcaaatcctgtttcttcgaagcattcgcggatcgccgcgtcaatatgagtttcgcccttttcaacatgccccttcggaatatcccaatggggcgtttcagtggcatggcccatcaacacggcaccatctttaataaagataatacccgctgatagttccatttattcacctgcaaaagcgttatcaaatgctttaagtgcgctgttagcgcgagaactggcttttgtctcaccagcatgaatgttttcgaagaaagtgcgtttccacacttcgcgacgaatggattcatgttccagacggtttttgtgattactgcgaatctgttcttctgcgttataacggtacagatcgagttctgcgtttaatttctgttctaatgcctgtgcaaatacatgttcaatattcattttgtatagcctatttcagatttaaggttttcgagggtggagtgataaacaacattcccttcatgtcgagtataccatacttttccgttctggttacactcattcattactttttcatctaaaccagggatcggcttcatgctgggagaaaacgcgatagacatcatttgctctgcactatcagcaaacccacaagggaaaacagacccagttggtttatcaagatacatcaactctactttagccatagatttcttcgaaatcctcacaatcaggcaaatacgtttcacagaaggtgcaaagcgtaaagaatgcaggttgacgaataccaggattatccggtagatacatccagaaggtgttagcaaacacgatgaatgttttcaggttttcggtggtaatttcactaacaccatcatacccggattgattgatcgcgcgttgcagaggcacctcatactgttcgcaatagtctgcataatgatcgcttgttaccaggctattagccattttaatcaaatcaacgattttcatgattttacatattccactttaacaggttttgcaacaaatttatctttggtgcgcccatgaccattacacaggtcacattctttgttgaaatctttcatatcttcaacccatccagaatccggcaacccagacggatatgcgttataacgaatggtttcataaccttttccgttgcatttcgggcaaacatgaggacgttcctttttagcagactctaccagttcgcgaatggtagtagaactaccataagcccgactcatgttttcaaagtcttttaaagtcatgctataaacatcaatgatgttatattttttaccggatggtttagccataatatatttctcacttaaagaattttttgatgaaagagatagcaaggccgataccaaagaaaacccaatatgctttaccatcaccatttgctaacacataaactgcgttaccgtatgcaaagatttccgcgatgttcattaagtttctcatgatatcctcctttttctatattaagtatcttaccataatataaaccaaagtcaacaacaaagttttatcaacccacttatcaccagtcattagtaatcccctacaggttgagacgccgcaacactcaggatcttgaaagtgcaattgttccactcacaatacgtttttgcacagtgaacacttcctttcataacaaacccgtttgagaaaattaaccagtaaagtttcatgatagcctcctttgtttcgacaaggccaatataacaaagcccctgcacgaatgcaagggcgtttttcagtttttcaacatccaaagttgcggaggacaatctttagaagcgattagacgatccaggcgggacataacccgacgataaccgtcgtattcaaaattgatttttggcggaacgtagttaacctggattgtttttctgttagctaaagaaacatactcagggatcaccgttcgcaaccgtatagcgatgactggcttctcttcaccttcgttaaagaacatctgaacagtgataggacaggcaaagatcttaccgtttacacgacgataaacaataacttcctgcgtcccttctgttttggccttcacagcgtaagttagaacataacacgaataatgatttgctagactcatcatgatatcgcgataagtttcaatatcttttttaatcgatactgaacggtctttaaagcgatctgcaatgtggtcagcagtagccgctaccttgattgtataccagtcacctaacgcgctagtaaacgcctcgctaacttcttttcgtacaccgttaacaagatacattaaacgtgttctgttcatataatcctcactgatttttgaagtattcgatctgacgcaaacgcttttcagcggcggcttttgaatcgtattcaccaagttcttttgtgcgatcgtggttcattactacccacttgtcgcctcgctgttcaatgtgttctgtaatgtcttttaacgacttatccagatccagtgattcagcctcttcacggataatagtcaaatccactggcagtgtcaacaaccttttcactccgctgatatcatccagcatagaatcatatgcaagggttacgtgcggcttgtaatccgggtaatcgtatgttgcaccagcatcaattgaatctttgaaacggctatgcaggtattcagactccaggatccctacgatagtgctaccgtattttgtgtcccacttttcaacatcaaccagtttagcaggttctataatgtcctgttgtgggaacaaatcaaccgttttccggctgtatacgatcgttgtatgcatcttttcggcggaaacagcattctttgtgatacctaatgtcttttgaacatttttcaaagcctcacatgaagcctgatcgaatttagcacacatgtagataccaggatctacaacaggttttgtgatttcaagaaatgatttcataaaacaccccaataaaaaaggggccgaagcccctttgtaataaaatttgtttttacgcttcttcgccaaaggcggcttcatcttccgcgtctttttcgacttcaacggaagggatcagagcggataccgcgccaatcactgcttctggggttactggctggcttgcgtcaatacccagtaccgaacacaggtcggacagaagttgacgatgaaccgacagttcactttctttttgcgcgataacttcgttaagatcgaatgcgcggcctttcagtaccagtacttcattttgcagtttttgaatatcagacattttattacccattgttaaaatttaaaagtatcgagcactttgctctttagttgtttcaaagtaccttcgttagtgatgatactatctccaggttgaggtgtcaaacctttttccgtggaatgttcatcaacaattccggtatcctttacaataaacacaaacttagcacccaaacgtttcaggtatttatattcgtgttcctgacgacagtcagttaccagaaggtggttgtattcgtcactagcatatttattgacgaatctttccagtgtgtaacgaacccaaaccgtgttatcatacttgcatacgatatcagttccaaacacttgcatcaagcgtctgatactccagggagtatcgttattcataatcaggttatgaatatcacccttactatgaacaatattgtatccgcgttctttgaggatttcaagcccgattctgaaaatatttagaacatcttcattagacatcacaagaggtttctctcgatcgccttcataaaaaatagcatcaggatcagaatattttccttcaaccagattacgaatgtatggtttatcgtaaccatatctctgcattgctactcttagcgttcttttgataccaaatgccagtgcttcacactgaacatcattgtacgcctcttgaataaatttagcaaccgtatctttaccagttcgcttttttccactaatcacataaatcattagctcattctcttttgagaagtgactacttttccgtcaatttcaacttccatatgaaggaagccaaaagttgccatacatgtaaccgcttcatcactatcgttagtatagcccaattcaacctcacccaagtttgtggggaaggcaccataaaatctaaatgtggcgatcgttttcatctgggagttatccaggatatgcacagcgaatgattgcttaggatcatcccacgcaacagagttaaactcgttgtaatcgtttgtgctcaacatccatatgtaaatcccaagatacgatctcatttcctcatcgactacaaagcggatcatcaaaggatcaaactcaaaagccgaaccaggtactttacctcgaaccatcatatttgcaggaatatcaactgctgggaggttcattgatggtagtgtaaccccttgaacttgtaaagtcaaacctttcatgtaactgttatcaggaatatcaacccgaaagtttgtaggcgagatttggtttaaaatcatttctgtagacataggatctcctttcctctatttagcggggaacgggatcgaagcgcctgacggggtaatataaaaatttgaagaaagtacttgaccttttaaaatctttgatctataataattattaattaaaattttatcaaaaagatctaacaagatcaagtaaaatttaataaataatttatcaaaaatttttggatctgatcttgaattcataaattttatgatctataatatactttttggatctgatcttgaattcataaattttatgatctataatatattaatattttattttatcataaatttttatgaagatcaatacctagatctaataaattttatgctttttctgaaaacttttcctttaccccgtcactaaatactggtactatgttcccatattggaaatcaggaaaaacaaaatgactcacttgaaaaaattcaaagaatttctgaccgaaggtaaaaccctcgctcgtaccgtagcacgtggtcaacgtgccaaaacttccgataaacattcaatcggttttcttcacttcaaacatggttctgacttcgaagttttagcaccggattctcacgatctggcatacttcggtaaaaacattgtacgtttgaaaggtatgactactggtaaagttcaagcggcttatgtcgattgggctaaaggtactgtttctttctacagtggtaatccagataatgatatggatttcgacaaaccagaaaaattcaaagcggctactctgtatgaagaggcggaagaaaatctggatctgtataaccagttagcagaagatttcgaaatcgagatcccgatggatgaagctctggtgaaaggtaaagtttacaagctcccaagcaacgatatgcgtcttctgtatactgggcgttctaaaactaaagcaagcggtgaatatgcagtgtttaccgtagttgatgcttccggcaaacctcgtctggtatctggtaaaaaattcacccaggaatataaaggcgatatggtttctaaactggttctggctgaatcggaggaaatcaatgaagctaaaggcgttcgtgaaaaagttattgcagtactcgttaaacgaggatttaacgaaaaagacgcagagaaaatggttgataaaaacctgaaagatgcaatgaaagttcgtcctggtgcaacccctggaaaacttgctgaaatcgtaagtaccctttaaaaataaagccccttcctttcggttggggctttttgattagtatttgctccagacttttttcgcgccgtaaggtttccctttggacataaattgctgagtcggtagccaaacagctttagcccaatctttcggggcaatctctgctaatggtgatttgaggtgtgatggtagatatgctttgatcatttctgttgcgcctcgcatacctttcacgttaccccagttaattttgagtatagtcttgttagagaggcgtttagtggatccgtaccctcgcttcaataactcttctaaaaactcctgtcgtgctctgggtggcgcatagtgcaagttcaaaccatagaacaccaagttacccgcttttgatcttccggatcctaagaaaatgatcagtggaaatctatcccagtacggcagggtgtctttatattttgcatcatatgcaaacgtgtacaggcgacccgttgctggttttgccacacggtgtgttttgatactggttttgatgaaattaccaaaccattctgttgaatctttctgtcgctttgctgctgatacaccaacagtgatctttttcagactattacggaaatcgttgatgatctcgatcccgtgttttttacggtagtcattacgctttttacgggcttctgtctctgcggaacgtcgttcaatctcatcatcgatctgttttttgtaacgatgcattgactttgtgaacgttgcgtagtttaatccctcagaatcggcaaaacgtttagcagaaacacctttcgtttttgccttgcggaatttgatccccagttcaacccaatcactcaatttgcgttttggtggtgctttgggtttatcctcttccgcgatgatctcaaactcaaaaataaaactcatgtttccctccagggattactgacctcgccacccaaaaacttttttgagtgattcttctgttacaattttgaactgccagcctttttgacggcatagctcatttgcggctttccacttatcaatattaactgtataggtgtaaagagcatcaataaatttctttttattgtgtacgttgttgtttactggcttcggtgggggcatcgtttctttaaggggcttaacctcccaaagatatgtagtaccattttccatttccacatagaaatccatgtaatagcgtcttctcttaccgtctgcgttgcagaaatacgggatcactatacattcagaattccaacgttttacgtgtgggtttttatccagccacttcataacgtagcgctcccacgatgacctatacgtaatctttcgcggatcgcctttatacttctgtatgttttcgggtacaaacgaccctttatacgtctgtcttccagccattgcgtaaatcctaaatagaataatataacgtttagataggggaacttatcgtgctattttcatacttcccgcctgttgattacaaaggcacccagacaactgatattttccgagactatcgattttattttaatcgtgtaattggaaaatataaaacccgtagttaccagataacaggtacactacgacctgaacaactcgcagaatcattatatggaaaccagcaatactactggattctgttgatgcttaactctgtttatgaccctttctatggttggatcaccgatcaggaagccgcgtatcagtgcgctatacagcgttattctgaggttggcggtgaacaggttctgtatcatgtagatgaaaacaacaacaagtattataaccttgtcgaagaccccaataaccctggtcattggtatgacaaaggtgacaaaccaatgctgtatttacagtatcaaggtgtattagctcctgtagatatttatgaagatgcagtgttgcaaaatgaagcaaaacgaacaattaaaatcattagtccgtctgacatccaggcgtttctgaatgattttattaaagaaatggaaaaggctaactcatgaaattaggcggaaatttacactcccctttctttgatggggtggttgaaaacgttgatgatccgcgcgggttgggccgggttcaagtccgtgtatttggacaacacccagcccaaaaacaaaaatccgatgcaatcggtgttcctgttgaagatttaccctggatgatgcctattcaggatattagaagcgctgcgatctctggtgtgggcttctctccaactggtatcactcgcggatcctttgttgttggttattggcgtgacaaatggcaccaagatggtatgataatcggtactgtcgctggtgaatatgtcgaacaaccagacacacagaaaggtttttgcgatcctatgggtgaataccctcgctatgttggtaacgatgttaactcccttgctttaggtggtttgaaaggtaaaggatcatcaagtgtcatcattcgtgattcaaacacaagcatagcagtaaacccagacgatcgcccactggatgagataccagaagataaccgccctgatacgggtggatttacgatcgaaaagatgctcaagcaggatgaggggatccgcacacgctggtatacagacagtgaaggatatccgacaattgggatcgggcatttgcttatccgcgaaaagactcgcgacactgcaaaaattaacgctgcgatcagtaaagcggtaggtcgagaagtaacaaacgggacaatcacggcagaagaggtatcaaccttatttgctcaagatttagccaaagtgagatccgacattcagagaacagctaacgtccgtgaagtgtatgtgaacctcaaccgtcctcgtcaaatggcgatcgaaaacatgtcgtttcaaatgggcgtcggtggtgttgctaaattcaccaataccctaaaagcgatgaaaaatgaagattggcaagcggcttataatggtcttcgaaattcactgtgggctagtcaaaccccaggccgttcttctcgcgtgtctaaaatcgtcctcacgggcaaccttgaatcatatggggtacaagtaccagatccggaagggcgctctctgagtgctgcttacgctgcgtataacggtgctacgttgttggctgctagtccggaagatccgtttactcctggcgatacccgtgtgatgtttgaagaaccagcatcatcgtataatgctgaatacccgtataatatggtgtttgaatcgagatccggacacattcaggaattcgatgataccccaggatacgaacgatataaccgtgttcacccagcagggagttacgaagaaattcgcccggatggaacccgcgttgttaaaatcgtaggggatgactatcaaatcgtgatgcagggccggaaactcaacgttaaaggcaacttgcaggtagttattgaaggtgacgcgttcatttacaacatgggtaacgttcaacaaacagttgatggtaacgtaactgaatttgttcgtggcaacgttcaacaaacggttgaaggtgagtacgttggcctgattaaaggcaatgctgaactaactgtaaacaaagatgcaacagttaacgttgatcagaatcttatcgcaaatgtgaaacagaatgcaaccgtggctgtaacagaagacgcaacggtcactgcaaaaaatgcgaaaattgagattgaagaaacgatggatatcggtgctaaagatatcaatatcaaagcaacgaataacacgtttattgattctggcgcattaacaaaaatcaccggaggaacggtacaggttggataattttaaatgcaaaatgaaggtaggctaacatgattatggattatgaatcaataattgatggaattatgcaaaattatcagcatccttgtgatgctgagatccccgctggctattatcggcgggttatctggcaagggcatacagaaaattatccggctgttggcgttgagtgggatactgagataatcaaaatcggtactcatctttatactcaagaacctttcggacatagaagcacggatctacctgttgtcaattcaccgggaacagatccaaatacaggacaaccaacagggatccttgttccaaagattggttattatttcaacactcaagcagaaattgatgcttacattacatccattggtgcaactaaaatcaatggtggtaacgattggtatggcgcggatctgtcaaaatcaaacctatacaaaaaccctggcgaactggctatgtataaggttgaaaacagtggcgggtatctttccggaacaaaccctgtatgtgatgctcgcatacgtcaggcgtataatcaggacactggcgcattcaccaatattgattattattggaatggtaatcgtatagcctatatgaagcatgacgaaacaggggcgcaccagtgcaaatatactggtatgcaggttaacaccaacgcagatacaagcattcctcctgttcctcctgcaatgtcttccacttatggggcattaccgagtgaattaagccgtgctgatatttcgtgcattccggcaactgttggtttcgcatatacaaatatcagtgatgctatgttacaggcatggaacgaaacccgtaatacgttcaagctacagtttaacatgttaacgggtgctgtacagaatggattcggtatcgcgacgatgtttgatggtttatccgtatcgatggaagaagtaatggcgggggcgctcgcattgtcacagcaagcatggcaaactgctatgaaagttttcagacaagtgattagcgctgcgtttaacattatcggtggtgcgtggggattgattaatcagttcttgcctcaagtaaccatcttaggtgttgcgatcaacatttacgatctggtgtttggtgataattctgttcagactttgaaagatgcatttaatgcaatcatcaaatccggacaacaaacatatgaaaccgtcataaacgcaatatacggggccataggaagcgcatacaattactctgtggaatatgtcaaagctggcgctcgcgaccttgtggatgcatgtagcgcgttatttgattggtgtttaacgatgttccaaaacggttgcgttgcattaatcgacttatacggtcggatcatgcaaacatgggctatccctccggaagttccaaacccgttatggtctgcggtgctggctatccgtaacatcatgatgcaaatcaaaccacttgatataattctgggcggtaacttccctggattcactgcaatggatttgtatcaacaagcacaggaaaaagtcaaggcttttgttgatgagtcatacgaacagatccgagggctttacgaacaagggcaggaactttataaaacgttaaaaaatcaaattttcgaacgtgatgcaattcagagaaaattcaaccagtacttaaactggatgtggggcgctgtaacagatgaagcaacagcggcttatcaatctgcattggatgctgcaaacgctgctgtagctgcaacacaggccgcgtatgacgctatacaagaacagattggatctctacaagatgcaatgaaagatacatacagcatggcgatggaagaattaaagaaattgcctttgatgagtacaataaacgagtttttaggcttctgtggtgtcgcatttgacgatcttctcaagtcatatgaaaatgcgattactggtgctcagtctctgtacaaaaatttcattgatagttcgcgctcgtttaaagatcactgcaaagtaatctataaccaaatttgtactttggcgttgagtaaagtcacacaatatgtgaataaattgctatctctcataggattagcaatcaattttggttcgattagtgtatgtgttccagtactgaaatactaaatagtcgaatgatcaagaggaatttataataatggctactgctaagactaagactgtcaaaaaacagattaaccaaatccccgatatttttatcgggggcactttcgaagaaattaaaacagatctgattgattggctgggtggacaagaagagtttaaggattacgatttttccggctcgcgaatgaacgtactgatcgaccttctgtcgtatgctactctgtacattcagcagatgggtaacacggctctatttgaatcgtttattcgcaccgctgcattgcgtagttctgtagtacaggctgctcaagatttaggttatatgcctgattcccgcacggctgcaagtacagcagtaatgattacggctgctaacccgctgaccccaacatcgatccgtatcccgcgcggtacaaaattcatcggtactgtaaagaatacagacagttattcttttgttgtatcagatgacgttgttatcgttcgtgatagtaataacaactatacatcaatgctgaacctggtgcaaggccgtttagttcgtactgaactaatttatgacggttcgagtatcctgatccgagatccaaacattgaccgtagtcaagtacgtttaactgtaaacggcgcacaatgggaagactggacaaacgaaagcattgtaaacgcaacaggcgcaagcacaatttactacatgcgtgaaactgttgatggacataccgaagtttatttcggtgaaggcgaagcaagccagcaagtagcgggtggtgcattaaccgctgaatatatagggggcttgaaacctgctaatggttctactatcgttattgaatacctgtcaaccgatggggaagcggctaacggtgcgaaagattttatctatgttgataccttaaccaatattagcatcacaaacatcgaagagaacccgactaaatcccctgattatgttggtgctgatggtggtggcgatccggaagatatcgaacgtattcgagaactggccccagttatgcgcgaaacacagcgccgttgtgtgactgcatcggattatgaatcttttctgtctcacaggtttggttctatcattcaggcggtacagtgctttaccgataacgagaaacctggttatgctttcatttctgttaaaccaaagtctggtttgcgcctaacatcggtacagaaagaagatatgcaaacatatctttcaaaatacaaccttgcgacgatcaccccgtcgattatggatcctaactatctgtatatcgtacaatcagtaaaagttacgtatgatatcagtaagttaactgaatcggaggaatggctacgcggtcaggttatttcgtcaatcgactcttattatactgataatgttgaaattttcaacaaatcgttcagcgtgtctaagatgttgacttatgtcgatcagtctgatacttctatcattggttcagaagcagatattaaacttcttcgtgaaatcgataactattatagtgctccgatgtcggggatccacttcttgaatcaggtagaatcaaaatcgattatttcaagtacattcaagtttacaaatgatgctgatgagagttatgatattcgttacgcttctaccgaaatggatgaagatggtaacgcaaaaatcgtaataggcccgtttaaagatggtgatatctctattgctccttattctggcaatgattttgaaaaattgactgatgctggtgtacgcagtaaatattatgaagttggttctgtatctcattacaccgactttattagtttcgatttgggggttctcaatgtcccggcggatagttttagcgctgcatacattgaactgatggcgaagccattagaagaaaccatttttactcgcgatggttcgttgatcgtgtttgaaaatgacctgcgtcctcaatataccacattgactatgaatcctatcagtcaataatctttaacccctgtcttcggataggggtttttctttttataaatacgtgatatacataaccgcaaatttggagaaatataatgattaaagcgccttcgattacgagtttgcgcgttgataagctggctgctaacttcgtttaccttaaatgggatgatgttggcatggatttctattatgtggttgaattggcccgtagccgtgatatggacggaattattatcccagatgaaaatttaatctggagtcagttgggctatagctacgaaaacgaatggtttagcgatcaggtcgccccaaatacacgttataaattccgtattcaaacaactcatgaaggttttgaaccttctgattgggtgattagcgatgaattatggacgtttgatgagaacgcctacgcatatacaaccatgcgtgaattcacccctgctgattcgtttatcaatgaaaaattcgccaaaaacaatcgtgattacgttgattttaatgatgatgttattatggcttctctgatggttgaggattttgtatactctcccctgtattctgatgtaagtcagatcagcgataaaatcctaaaacaagaaagttatcacgaaattcaagatcatatcgaacatgtttgtaatgatatagatcgcacttttctggtatactcaaacggattgctttacctgtttgaacgttttcagaatatggctaaagtgtcaaatgacaaaggccaaacatggtattattacaaagcattaaacgatcgtgtaggtaatccggtttcccgtactattgcctatcagagcaccaacactacgtatgtgttaggatacgatcgcatattttacgggcgcacgtcaacagatattcgttggtcttctgatgaagttcgtttctccgcagatgatgtaacatttgcgaagctggggaaccaatcagggttagattttgatgttgactcatacaacacgtatgcgcgtctaccgggcggagtgtcgaagtatgccgaagctatggcttgttctagtgactggctctacgtggctgctaagaacgttatgcgccgtattgcattacgtaacacaccaattgatactgatccaagttcaccgacctttggtgaacgtatttttgatgaagtctcttataccatcgtaccaggaaatgataaaattgttgttaaaaaaatggacgtgcttaatgatcgtttgtatgttctggtaactggtgaagttaaaacggcaatgatggatccaactgtcaaggctaacgtagttccttctgatgatgctggtgtttatctatgggatgaaaccgcaaaaacgtttacccgtgtttatggtaaaaccgaagaggaacgtttttatatcactcatgaatataccaatatgtcaacaaatggtgatgaagtttacatttctgttggtaactacaaatacccaggcactttaccggatccagatttggttcagaaatacccagaagatgtacattcggcagtgaaatacgatcttgttcctggttatacagcgagcatttctattaactttgctaccgttagggcaaatcagaacgaccctactgtgtggaattttgggccgcaagagtactacaacgaggcaaactttagctggcattttcgcgataaggttagcacatggatcaccaatgacaaccgtcctctggtagtttatccggaaaccctgtatactctggttactgatagcgcgtctcctgcgtcaacaattcgtgtaaaccatgaagtttgggacaaaggaacagttactatctacttgaataacatcaagtttactggttttacgaagtacacaaacggtgttctattgtatcgctcaggtggtagaatcattggattctatgaactgtcataccgtgcaagggatgaactcactattttctggaaacctgataacactttaatggtggcaagtctggttaatcaggaacgtgaaaacccatacacaccggatattgctcctggattaattgatcctgatcttagtcatatgatcactcgatttgccccacaaagctatctggacaatcaacagtttgaaaaatttggtgaatactatctgcaatatgtttcattgggtagcaatagttactataacaaattgctgaacttgatccggaacaagtatccgagagagaaaaacaacgttgaatatttgtggtctgaaatcaaccgccgtaacatttacctggataaatccaaacgtgatgcagtggttagattttttgaatcacgtgcaagcgatttctattcaacaaaagggatcgaagcaagttatacgttcctgtttaaattactgtataacgaagatgtgacagtagaaattgaaagttctaacactcttgaatatgatattttggttagttcaacaaatatcagtcaggatatcgtaggccggacgatctatacaccaactggtcgcgctaacgttacatacatcgaacgtgaatatgaaaatggtcaattgcgttggtcaatgactctgcataatgctcaaggtaactttatcgaaggacaggttgtcaagtcagaaaaaacgaattttaccggaatggttattcgcggtgttcgcggtaaacaaatggcgaacaactcgatcgactatatcaaccgtgggcgttcttactacgtgatgaaaattcgttcaaatctaccgacttcccgttataaggatgacgtgttgcgttttgttcaccctgtaggcttcggttttatgggtattacgatgttaacagtattcatcaactctggtttgtcaatgactcataacgagacaatcattgatattctgagaaactaccgtttcgatagtggttatcctaagttctggcctgatcgcattgcgagtatggacggtaacggaaaccaacaattcgacctggtgactggtgaacctctgtacaccgcacacccgcgagcgggggaaccgtttgatgtgcctccggaatatgacattgacgaaaaacctctgaatggtgtattgccttctgcacgacggtttgatcaaagtccgttgttcgattgttcaggcgttaaatattcacagttccgtaatttagtggataaacgactgaaagatgatgcaggaaacccacgtgatcctaatcctccatcacagattaaggtaggaaattaaatggcacaacaaaacttgtatcggtcggtaattaccgcaaaattccgaaccgaaaacttgatgaacttcaaagatatgatcggcgatgccgccgatctaaacacaatttatatgtctattgggcgaactgaatcatgggcggataacgaatccgatcctaactttgcgcctccatatccaaacgatagcacagatggtgttagtgatatgtggacacatatgatcggggctactaaagttcctggtgatatgatagatgcaattttaccacgtaaagactggggtgatactcgctatccaaacccaaaaatcttttactttaacgatattgttgttgtaaacaccgcgccttataaccgtactgatccgggtaaaggttggatggtttatcgtgtagttgatgttcctgatattggttcttgctctatttcgagtattaccggaaaacttgaatgtatcaggatcggcggtatctggagtccgtctcatgaatctagtgaacctccacgcggagaagctaacgggatcgacatgggcgacggctataaatgggaatacctctacacaatcccgccagatgtcgtgatcaaccgttgtacaaacgaacatatcgtagttcctttccctggcgaactggaagaggatccggtacgttggggttatgataacgtgattcaatggtatccaggacaatacgatctagtgtatcggttgaaggtgaattcaatgcgttttcgtgcatacatggattctcttttcttcccgcaatctacgctccctggtaacaaagggttccgtcagataagtattattgtaaacccgttgattaaaaaggcaagcccgaccgaacctgaaaagaaagcaactggtgattactataatgctaacgcgcttgaacctgattccggacgtatgatttacatggaaaacagacaacctattattcgctcccttgatcagactgaggaagtgagtattgtattcgaattctaaggaaaaacaatggcttaccaaacagcaaaaaaactaattgatgtcggtgaaatcggcaacccatcaacaggcgacccgctttatgatggtggtgttaaactgaacgaaatgatcaccaacgtttataatgcatttggtgatgtgcgtatgctgtctgcaaacgaaggtgtcggtaacatggtgatccatgctaccggatactatcagaaattaccacgcacttactattcaagtacaccgatcgaactgggttccttgcatgacatggatacttcgacaggttcgattaccgttgttcttccttctggtaaggttggcgaaggttgctacttcataaatagtacgggtagtgtctctgttgatcgtcctatcgcgtttcgtcctcaagttggcgatacaatcgcgggggttgcagaccagttgtacatcacgtcaccttacacctttgtaaaaatctggtgtactaaaaaagaaggcgcgatcacaacatgggattattctgtagaatcaatgtttggttctaaaacgatgccagttgacactacggcgcttgtactgaaagcaaaccctactgctattcctatgtttgggtatggtgaatttagcggggctaaggtgcttgtatacgcagaaaacgtagctggtacagttaccaaaatggcggaagttttaatgaccgtggatcgtgtaaacaaaacgatttattcaacggaatacgctattttgaaaaacagtgaagatgaaatgtttactctaaactttactgttggtgctggtgatgtcgtatacgctaacgtgcaagcgatcaaagaagatcgaattaaattcacgattaaagcaatcgatacgattaaatcagggatcgcgtcatgaaacaagaaattttaataggtcaggttgtagacgatggtacaggcgattacctgcgtcgaggtggtcagaagactaataacaacttcacagaactgtatagcatgttgggggatggtgaaatcccccatccagcaggtgcctggaaaacctttgcgggtacgactctatcaccaaaatttggtgaatcatgggcgttgaataccagcgcaaacaaaatcaccgtaaacctcccgaaaggcggcgtaggcgattataacaaagttattcgtctgcgtgatgtgtggtcgcgttgggccactaacaacgtcagattaatcccggcaacaggggatactatcaaaggttccccaactcctaaagatctgtttaaagattttatggatgtggaactggtgtattgttctccgggccgttgggaatatgtcgaaaacaaacagattgacaaaattacaacttcggatctggcaacagtagcgaaagaaacgtatattgcgactcagggacaaaccgacttccctaacgtattcggcgttggtaatgaatacaacttgcaatctttcgaagtttactatcgcggtaacttactgttcattgatgagaaagacggattcaatgcggctaactcagactatggttcgattggttctgcccctggtgaactggttgcacttgatggtaattcagtacgccttaaaaacccgtgtaacgctggtgacacgcttcaatttgttacctatctagacgggttagcaacatggcgatcgagctatgaagcgtatgtgatgcgcatgtatcagactggtgatacttctctggaaaccgttccgggtgaacagtgggtaggcgatctggcaaccaaaaaagagtttacccctgctgaatttggtgttaaccctcgcgtgttgattaaccctaactcgtttgaactgcttctcaacggtaaacaactggttaaaggcggtgacgctgactatccggcgttttcctgtgaaggtgcggaaggtgttgatgaaagtacgtgtgtgggtaactctggtgtatgggttccgtcaggacaggattatagtttggtattcactgattctgtagtgacttcaatcaagtttgctcaggaactggaatccggcgacgttgtaacgatccgttggtttaataacgatatcggtactctgatggattgggacggtacaggcggtattaaagagaaagcggataaagtttatctcaacaacgaagaagaagtatcgttgactaaccgcattgaatataccgattataacaatccttcccagaaaacaatgcgtaatactggggaaacctatcaggggcgtattctcgatattcaggctctgtttgatattattcatccaatcggaaccatttacgaaaacgcacataatccagcaaaccctgctgattatatgggttttggtggttggaaacgttatgcggaaggttatttcctggctggctggacatcaaacgcagcggatccggattttgcgttaaacaataacgatttagatagtggcggtcaaccgagtcatacagcaggtggcactggtggcgatcgtggtacagaaatcaaaatcatcaacgttccggaacttgtatcaaaagataaagttctgattgctgatgaaaatggtgctgtgatcattggtggttgtcagttggatcctgatgcttctggccctgggtacactaaataccgtgaggatacattgaaagtgaatcagggtaacacattacctgataaaatcaaaactattccaccgtatatgactgcacatcgctggataagggttgcataatggcttacaacaatatttcaaaaacaagggagggcgctcgcgtcctctctaaagaagcagattacttacagtatgatacttatggtaagttgcctctgatcggcggtaaacgttcgatcggcgaaccaaacattgaccaaacaaaacgcggcgttctgtatggaaacgtacaatccgcaattgatgacctgtatacgcttatcgagcaaatcccgattaacggcgttgttaccatgacagaagatgcccctccaatcgctgtacagcaggttgagagcgtttcttttgatggcattgtacagaacatcgattcagaacaaacaaaggctgtggttcacgtatacggcttcccgtttatctttgataacggaaccaacgccgcaactgtttgtgaaactgcgtataacaaatttacagaatttgttgctgcggaaaaatatttcgcagaagtgaaccgtaaaggggtagatggaacaattcttgaatgtcgttttattgatagtgttcctcatccggcaacaaatacctcagaaaacggtattcggcagatcggtacaattgacgtagccgcaaagagtggctatggttcatgggttaaattgggttctggcttcttacctgatgttactccgcaagtaaccgtgtattacttcaaacgaattgcataaggataacacatgagtaacaatacaatcaaccacgtaagtgataaatccatttacgtgacatttgacccaacaggtactgattggcctgataccataaccaacgtacaagatgcgttggaaaaaataggtagttgggcgcgtactgatactgggcttcctatcgcaacaacttctgttcgtggtattgctcagatcgcaaccgaagctgatattgacgctggcacggataacactaagattgttactccgaaactgttagcataccgtatgcagaaccctaaagcatcacaaaccgtatggggttatacgaagtattcgactgatgcggaatctacaaccgtaactaacgatacatcgtctattactccgcgatcgctgaactatgtgttcaataaccgcaaaggtacagaatcggtttggggttcttctaaaatcgctaccactgcacaggcggttgctggtacagataacactgtaactatgactccgcttaaagtcaagcaagcgatcgcgtctctggttccggttcagtcgagtgcgaccgaaagctcgcaaggtctggtacaactggcaacagttgcacaggttcagactggtacgatccgtgaagggtatgcaatttcaccttatacgtttattcgtttaactgcaactgaaagcaacctgggcgttattcgcatcgcatcacaggcagaagcaaacgcaggtactgatgacaccaaagcgattactgcgaaaaaattaatcaatacccgtgcaactggatctcagttcggtgttgttaaattagcaactactgtaggaaatgcagcaaacactgcactttcttctaatgctgctgtattgcctagtgatcgcaacgcaataattactggttctctttatgagaatagcgcaatatataacaacaaatatcagacgtggacagatcttgattggcatttcccagtaggtgctattgtcatgactggtttccagactgaccacggtagtttgtatatttgtgatgggcgttcactgaataaaaataactatccgttactgtttgagcgtataggatatacatttggtggtggcggtgattggtttaatattccagactgtcgaggcgttgcagtacgtggtcatgaccgtgggcgtggactaaaccctaatcgtgggtatggtacatatgaaggcgatatgttgggctggcacgaacacccattacagcttatctaccagaacggcggtaacattccgaaatggcaagcagtttacgaactaaaaagcgccgagaagaatgaccaaagcgctcgcgtatttgatgcttctataactaaagctactggtgtgggcggtgaagaaacccgcatgaaaaacatcgcattaaactacgtaattcgtactcaatagaggttattaaatgatcatcgacaaattaaatccgttgccgaagatcccgtttgttgatggcgtcccagatgacgccacgactcaaacgaagattctttggatcaaaaacggtgaaactctggacggttcgccagataaagtgtcaaacactggtagtcttaaccgaactggtgtaaacatccagcagaacgcggttcagttagaacaaaataccatcacccataatgataaaatcaatgaagttattgatcaagttaacctgatcactgaaaacattgatgcgattggtgatgaaagtgtaatcaaaaaagttaaccaattggatgaagatgttaaagcattaactttatccaatacccagacacaaaacaaggtagcacagctaacactttctgtaaatgctcagaatgatgaaatcggtgaatacgatccagaaaaagatccaaagcatcgtactattcgtgatgatatcatttacatcaaaaaagaagttggttcgtatcctgggtttaccgttgacggtgatgttgacccttcttcaacaggcacaggtcttaaatatcgtgtgttgagtaaccaacgcgctatttctatgcaggaaactcgcataacgaaacttgaggatgattgggcgctttcggaagtaggacaattaacagaagaagttaaagaacttcgtgctgaaatgggtgattctggactggcaactaccagatccatatatgcgcgaataaagattcttgaagatggatctattgtcacacaaaatgaattggatgccattaatagtttcattgggcgtaattctagttctaccagttcaatcaacgaccgtgtaaacagtttggaaaactcagtcagttctttggctacgcagattaacgacccaacaactggtattactgcacaaattgcaacaatccagggacagataggcgatgtttcaacttctggtagtatccgttttgatattgcgcaaaacaaacgcaagctgatggatatggaaatggtcttaggtgaatccggtgatgaaggattacagggacaggttgcaatcttaactggtaatatcggcgaagattctgatcctaccagcatcaaaggtcgtctaagtgttgttgaaggtgaactacgcaccaacactagcgcactttgggaactgcaaggcgttgtaggtaactcttctagtggattagtagcaacaagccagcaggttaacaaagaaatctatggtgatggggttagctctgatccggttactcgcgcggggttgaaaaccacaaccagaaaccttttcacacaggtaggcgataactcagaagggagtgaaacaggcatttatgcactgatcgcagaccttacaaaacgcattgaggatttagaagcgttgaacattgcacaggcacttgcagatcgcgtaactatcgaagatctgaatactaaactggctctatacatcaaagaagctgacgccgatctccgttatgagagcaagaacccgcctctggctttcggtactaatctaactggtgataccgattacagtactggcgatccattgtctctaagcgtaactatgacaggtggtgtttctccgctggcttaccagtggacgaaaaacggtgtaaacgttggcacaaactccaacacatttaccatcgattcgctacagccttctgattccggaacctataaagtaacggtaactgatgcaagccataaagtcatcgtttctgatgaactggcgatcactgtcgcttaacgattaacaaggggctacggccccttttgaggatctttatgattacgaacaacccagcacaattaaaagatgaaattctgcgccgtttaggtgctccgatcgtcaaaatcgaagtgacaaccgatcaggtttatgactgcattcaacgagcattagacctttatgcagaatatcattacaatggatctaacaaagggtatatcattcttaccctggggccggacaacccgaaaaacattttcgatctgagtaaagaacacattttcgcaattactaaagtgttgcgtactaacatgggttcccttgtatcgatggatggtactgcggtttatccgtggtttactgatttcctgatgggccttactggtggttctctgggcggtggtggttgtgcatcacgtacctacggaatgaacgcatacggcgcggatatgggctattttacccagatgatgagctatcagcggtcaatgcaagatctcctgtctccgcttccggattactggtataacgacgacacaggacagtttgcagtatatggaaccgttaaagatggtgatattgttgttatcgaagcaatgatcagatcctttgttgatgtacccagtatggtcggtaacgtcgctggatacgctacagcgggttctgatggtgaagataagccaactatagcagatatatacaataacccctacaaagccgtctcaggcggtgtgaaggctggtcaaggtacaagcgttcagggttcatcctctgcgtataacaaccgttgggtgaaagattatgcaactgctcttgttaaagaggtaaacggtcaggttctggctaagtttcagggtatgcaattgcctggtggtgttgctccggatggaacccgactgattcaggaagctatgcaagaaaaagaaaacctccgtcaagaacttctgttactgtctgatgcacttccagtgttgatgatgtaaggaggaaaaatgcaaaattgggatgaaagtctgtttgcacagttagaagatggttccggcgtcgatcggaacctaagacaagaagtaacaaacccgtatgttaactggtacaagtataatcctacacaacagttacatgattcactaacagccgaagcaattcaaatgaaatctccggatatgtattacgtccgtcgagaatttgttaatattgataaaattttgggcgaagaccgtgaatcgaagtttacaaaatcgtggaaaattgcagcatacatcgattcgtatgcaaactacgaaggacagagagacttttacagcaaattcggtatgatgtcaaacgatgaaatgacacttgtgatcaatcctcgtttatttgcacatcaaactgatggcgggatccctgttctgggagatttgatttatttcccgatggataacagcctgtttgaaattacatggattgagtttgacccgttcttccagttcggcgatcgtcctcaacgtaaaatcaacctcgttaaatttatctatactggtgaagaattggatcctaaactgcaacgaaatgaagggattaaccttgctcccgatgctgatctggatctcgaacctattcgaaatcttgatgggttggctgataccaatattgaacagtacgaagaagatcaagcctttgaagatgaaggcgatgaattcattgaatcgtttgatgttgttaacgggcgcggatcaccgtttgcacagttcccataaatataaccaggggaaaccctatacatgtaagggtataggagaaatcttatacccgctttaacccatacaggaaaaagaaaatgtttggctactggtataatagttcgctgcgaaattatattgtcttgatgggttgtcttttcaatcacgtgcaagttaaacgcattcgcggcgaacaagaaaaatttatcaaggttccgattacctacgcatcaaaagaaaaattcctggcatccatgaacaagttgaactatgcatacagtcaggaaaatgttgctaaaacggaaacaattttaccacgtatgaatctatccctcgttgatttgcagtataacgcaattcgtaaaaccgggatagcggtaaaccaaaaaatgacgcagttacgcgcacctggaaaaacagtaacccagtttaaccctgctccgtatcgtctcatgttcgaactgggagtgtatacccgttacgaagatgatgtgtttcagatcatagaacagatactgccatacttccagcctcatttcaactgtcgtattacagaattacataaaaacgacattaaaatagaccgagatattaaaatatctctgcaatctgtttcccctgatacatcgtttgaaggcgatgcaacgacacggcgacacattgaatggtctttaatgtttgaattacagggctacctgtatccgcctgttaacgagattaaaggcgagatcagaacagtatacacggatttcttttccaatatgaacccgttggacaaagacaattttgaatccgttgatgctcaggtggatccggttgatatgcctatacaggattacacgggagaagaatacgttcaaacgtatgctaataatatcccaattcctagcggagatcaacctcctaaaccgaggggccaataatggaagaatttagcgtaaaacaactacttgatcttgaaaatctccctggtgctgaaactggggaagaaatggttgtatatgaaaaactcgaactcgttgatgtcgagtcacacccagcagatcgaaaacctgatttagaggaagactatgcacttgcgcgtaaaactgcgcattacatgaatcagatgatcatggatatggcacaaattgccttgcataacgctaaaaactctgaatctccgagacatgttgaagtttttacaaccctgatgaatcagttaaacaattctaaccagggattgatgaaaattcataaagaaatgcgagaaattaccgaagaaacaacaaaaccaggatctgaaaaaggtaatggcggcggtaatgaaatgaacatagagaatgcaactgtatttgttggttcccctacggaattaatgcagaaatatggtagtgcatacgaacccaaagaaggcttcattaatggtgaagcagtagaggtaaaccctgatggaaatggaaccgacgatcgatccgagtaaggaatcagatcacccaatcggattaatgcatcccgattatctgaaaaagaaaattgatgaatttggggtggagtggacgcaaagcgaacacgataaaaaatggtatccgacaaagtttagcgattacctaaaaattaacggtatccagaaagttgatattcaagcaaaagacagttcaaactttgcgacatataaaaacaaaggtaacaagaaaactcgatataacggaaacccaaacctgaaacgcgcgtacatccaaaataaatggacacaacagatgttgatggaatgggttaaatgtcgtgacgatatcgtttattttgctgaaacatattgtgcgatcacccacatcgactatggcacaatcaaagtacagttgcgtgactatcagaaagaaatgctgatagaaatgcacaaaaaccgtatggttgcctgtaatctatcgcgtcagttgggtaaaacaaccgttgttgctatcttcctggcacactttgtgtgtttcaacgaagataaatatgttggcgttttggctcataaagcctctatgtctgcggaagttctggatcgtacaaaacaggcgattgaacttctccccgatttcttgcaacctggtatcgttgaatggaacaaaggttctattgaacttgataacaaatgtaaaattggtgcatttgcttcttctcctgatgcggtgcgtggtaactccttcgcaatgatctacattgacgaatgcgcgtttatcccgaactttgttgatgcgtggttagcgattcaaccagtaatatcttctggtcgtaaatcgaaaattcttatcacaacgacacctaacgggcttaaccacttctatgatatatggaacgctgctgtagaaggaaaatccggcttcgtgccttacacggcgatctggacatcggttaaagagcgtttgtatacagacggcgatgatggcgtatttgatgacggctattcatggtcttcgaaaatgatcgctagttcaagtaaagaagcatttttacaggaacattgtgctgaattcatgggaaccaatggaaccctgatcgctggctggaaattgtctaaactatcgtgggttgatactgatgaaacggaaactaatttctatcagtataaagctccagtagaaggtcataaatatattgcggtacttgatccagccgaagggcgcggtcaggactatcacgcgatgcatatcatagatattacatctatgccgtttgaacaggttgctgtataccactcaaacaaaacatcgcaccttattttgcctgatgtcctgttgcgttatcttatgatgtataacgaagcatgggtttatatcgagctaaatagcacaggccactcagtggctaaatctttgttttctgagttggattacgataacgttatttgtgatagctatagcgatttggggatgaaacaaagtaagcgatctaaagcgattggttgctcaaccctaaaagacttgatagagaaagataaactcatcataaataacaaaaagacaatacttgaatttcgtactttctcagaaaaaggtgtttcgtgggctgcggaagaaggtttccatgacgatctcgttatggcgctggtttgctttgcatggctaacaacacaaatgaaattcgcagaattttgcgagaaagacgatttgcgtttggcaaatgaggtattcgcacgtgagcgcgaactgctttatgaagatatgttatgtcctgttatcgtaacgagtggcgacgaaacaatatctgtcggccaacacggtatttcgtttatataaatttagaggaaacttaataatggctttaatctctccaggcattgaaactaaagaaacatcggtacaatctaccgttgttcgaaattcaactggtcgtgctgctattgttggtaaattttcatgggggccagcttaccagattcgccagatttctaacgaagtcgaactggtaaattattttggctccccagacaatgacaccgctgattatttcatgaactctgtaaactttttacagttcggtcaggatctgcgcgttgttcgtgtcgtcgataaagaagccgcaaaaaacgcaaccgcgatctataaccagatcaaatccacaatcaccgctgctggttctaactatgcagtagacgatcagatcaaggtaaaacacaataacgtcgttattgaagaaaacggcgtagtaactagcgttgacgatcagggtaaaatcctgtctgtgttcattcctagcaccaagatcatcgaacatgctaaacaggttggtgcatatccggatctgtctagtggctggactacagaaatcgtttccagttcttctggtgtttctgctacgattacaatcgacggcgtagaagttgatccgggtattactctgctcaaccttgacaccgcaaaagaaactattcaggcaactgctttccaggaactttgcaccaaatatcagctaccgtctgttattgcaatttatcctggcgaaatgggtagcaccgtaacggttgaaattctgtctaaagctgcatacgattcttctgctgttattaagtcttatccttctggtaagtctggtaaaaacagcggtcgcagttcgatgaactttggccctcagaatgataaccaatacgcgtttatcgttcgccgtggtggtattatccaagaaacgtttatcgtgtcaaccgctaagggtgataaagatatctacggttcaacgatctacatggatgatttctttgcaaacggtggttctcagtatctgtatggtacttccctaaactggcctgtcggattctccggcgttctggaattgggtggcggtacttcttcgaactctactgtaggcgcggatgaactcatggctggctgggatatgttcgcagatcgtgaatctctgcatgttcctctgctgattgcgggtgcttgtgctggcgaaactgccgaaatttcgtctactgtacagaaacacgctgtgtctatcggtgaaacccgttcagattgcgttgtgttcgtttctccgccgcgttctgctctggttaatatcccactggctcaggccgttgataacctcgtagaatggcgtacaggctacaaaatcggtaatactaccccagttgataacaacatgaacgtaagttctagttatgcgtttatcgatggtaactataagttccagtacgataaatacaacgatgttaaccgttggatcccgctcgcgggtgatatggctggcctctgtgtttataccgatcaggtagcgcaaccgtggatgtctccggctggctacaaccgtggtcaactgcgtaactgcatcaaactggctatcgaaccgactaacgcgcatcgcgattctatgtaccaggtacagattaacgcggttactggtttctctggtggtgctggatacattctgtacggtgataaaaccgcaacgactgttccaagcccgtttgaccgtatcaacgttcgtcgcttgttcaacatgatcaagaaagacatcggcgataacgcgaaatataaactgttcgagaataacgatgatttcactcgttcttccttccgtatggatgcaggacagtatatgtctaacgttcgcgctctgggcggtgtatacgattaccgtgtggtttgtgacactacgaacaacacgccggatgttattgatcgcaatgagtttattgcatcaatctacgtcaaaccagcacgttctatcaactacatcacactgaacttcgtagcaacctcaactggtgcggatttcgatgagttgattggctcaacgtcagtataacatgcaaggggctgaaaagcccctataaatacacatagaggttagaaaatgcttactgatattgtacgcgcctttgaatccggtgatttcgcacgtccgaacctgttcgaagtagagatcccgtatctgggcaaaaactttaaattaaaatgtaaagccgctactatgccagcgtctaccgttgaaaaagttccggtaggttacatgaaccgcaaaattaacgttgctggtgaccgtacctatgatgactggacaatcacggtatataacgacgatgcacacacaacccgtgatgcaatcgtagcatggtcaaacatgctgcatggtatgggtgaagacattacaggggatatccctgcaaactacaaaaaaaccgctacggttaaacagaaaaaccgtaacgacgaagtaaccgccgaacataccatttatggcctgttcccgaccaacgttggtgaggttactttagactgggatagcaacaacgaagtgagcactttcgagtgtactttcgcgctagactggtgggtttaaacgctataaatacaggggtagcaataccccttatcattatttttcggagttgtaaatgaacttttttggattagacaatgtgttagggtttttcaaaaatttcgccaaacaggatgaaatggaatttgaagcccaattaaaagatgatacaggttcgattgcgcctccgaaaaataacgatggggcgcacgaaatcgaaacggacttgtcaaatcagcgttattcttctgtgttccaacagttctattccggacaggatccgcgaattcagaacaaaacacagctaataaatacataccgtggtatcatgacatatccggaagtggaaaacgctgtttctgaaatcattaacgaagcgattgttaatgaacaaggaaaagatattgttacgatggatctttctaaaactacttttagtaagaatatccaagataagatcatggacgaacttgataccgtaatgaatattcacgatttcgataaccgaggctctcgtttattccgtgattggtatgttgattcgcgtatctatttccataaaatcatgcataaaaatgaatctgatggtatcaaagaattacgccagttagatcctcgttgcatggaactgatcagagaatcagttacagaaaccctacccggtggggttaaaattttccgtggctatcgggaatacttcgtatacaccgcaccaaaaaacggttatagctacaacggacagatttatagtcacaacgacaaggtaaaaattcctcgctctgcgattgtttacgctcatagcggccttgaagattgcgacaacaacattataggctacctgcaccgcgcggtcaagccagctaaccagttacgtttgctggaagatgctatggtgatttaccgtattacccgtgcgccggaacgtcgtgtgttctatatcgacgtaggtcagatgggtggccctaaagctacacagtatgtaaataacattgcacagggcttaaaaaaccgtgttgtatatgacgcgagcactggtaaagttaagaatcagcaaaataacctgtcaatgacagaggactattggctgatgcgtcgtgatggtaaagcagttaccgaagtttcaacgcttcctggtggcactgccttctctgatatcgacgatgttaaatggtttaaccgtaagctgtatgaagcgttacgtattccgttaagccgtatgcctcgcgatgatggcggtatccagttgggtaacgatggcggtattacccgcgacgaattgaactttagcaaatttattcgcgaattgcaaattcaattcaaccctgttcttgcggatccgttaaaaactaacttgatcgcgaagaaaatcattacagaagatgaatgggatgaaaacgtaagtaagattgcttttgtatatcagcaagattcttactattccgaaatcaaagatattgagattttggaacgccgtttaaatctgatgggccaacttgaaggggtggtcggcaaatatgtatcccataaatacgtaatgaaagaagttctccggatgtctgatgaggaaattcaaagcgaagccaaacagatagaagaagaatcaaaagaagaacgttttaaaaatccagaagcggaagaggaaaacttttgatgaaagaatttatcgaagcaatcaaaagcggtaatctggtggaagctaaaaaaactttttactccatcatggaagaccgcaaagaagcgcttcgtcacgaattgcgcgttgaacttgccgaagctgtacgcatcgaaggcgaagaagacaaagaaaaagacgacgaaggcgctgataaagatgacgaaaacggcgataaaaagccagccgaggatgataaatccgaaaaagatgatgagtgaggtgtgtaatgcaacttgacatcgaaatcaccgccgaagatctccaggaacatttagacgaagcgaaagcccgtgtagatattctgggtatcgatgaaggcacggttaaaatcatcgaaaatttggcggtcaccgaaccaaatttagcccttgctatgatggcggttgttgaaggtttaacacttgatgaggtaattgtcaagcatgttgattcccgtggcaacgtagaacgcctcaaagacaggaaaacccgtgagcgtaatgcgtatcagactaccggattaaccaaatcccaacgtcgtcagatcgcgcgtcgtgctctcaaaacaaaacgtgctaacccgtcaattgctactcgcgcacaacgtaagcgcaagaaagcattgcgtaaacgtgctgcactggggctataaatatgaatgaatcccaaatcaacgaaaacggcgacatgcttttaatcgaagaatggggtttaccttgcggtgacgtttcagaatctattttagaatctgttggggaatcaaaagacggtaaattgcggatcgaaggtattttccttcaagccgaaaaggttaaccgtaaccgtcgtttgtatcctaaaaacgtacttgaagaagcagttaacgattatattagaactcaagttaacacccgtcaagcattaggtgaaatgaatcaccctccgcgtccgaatgtggatccgcgaaatgcttgcatcctgattgaaaaattatggtggaagggtaacgatgtttggggccgcgctgttgttgttgaaggcgacggtggtgatggtgacaaactggcggcgttgattcgtgctggttgggttcctggtgtttcttcccgtggattaggtaagctctccgattccggcaaaggctacggcgttgtacaaaagggctttaaattagctgtaggcgttgatgtcgtctgggggccaagcgcacctgatgcatatgttaagcctatagtggaaaatcagcaaagcaaaccgcttgttgagaataatagtgctgatgacgcatttcgggcattgtccgagcgtttgaaaggtctataaatacattaaacaaaacaacaggaaaatcaaaaatgcttaaagaacaactgctggcggaagcccagaacctggatactccggtcgagttagacagcattttcgaatcagttgaactttctgatgacgtgaaagcgacattcaccactgtattcgaacaagctgtaaaagctggcgctgcaaaactcgcggaatcccacattacccagatcgctgaacgttccgacgaactggtcgaagctcaggtaactgaacgtgccgctgaaatcgaaactaagctgtacgaagatgctgataaatattttgcgcacatttccgaagaatggctgaaagaaaacaaagaagccgtttcccgtgacatcaaagccgatctgtttgaatccctgatcatgggcctcaaagaagttctggttgaacataacgttgtcattccggaagaacaggttgatgtagtcgccgaactggaagacgaactgactgaaaatcagcaggaagttaaaaccctgtttgaagcgaatcaggaactgaccaaagaaatttcagaaatgaaacgcaatgcagtagtttcagagaaaactaaaggtttgaccgaatctcaggtcgaaaaagtagaatctctgattgaagggctggaatattccgcaaccttcgaaaataaactcagcgcaattgttgaaatggtagcaaccaaagctgaaaaacccgttgacgagtctgtaaatactccgacaacgaaagatgactttgttccggtagtagaaagcgttccggcagagaaatccaagatcaataaatatgtacaagcggcaaaagccctttcttaatttcaaaaggtaagaaacaatgtctaagaaaaacgaattgatggaaaaatggaacgatcttctggagtctcaggaaggcttaccggatatcgctaccaaatccaaaaaacaactgattgctgccattatggaagcacaggaaaaagacgcagaagttgatccggtttaccgcgacgagaaaatcgttgaatccttcggtggtttcctggcagaagctgaaattgctggtgaccacggttacgacgcaaccaaaatcgcttctggtaactcaagcggtgctatcaccaacatcggccctgctgtaatcggtatggttcgccgtgcgattcctaaccttatcgcgttcgatatctgcggtgttcagcctatgactggccctactggtcaggtgttcgctctccgcgcagtgtacggcaaagatccgctggcttccggtgctaaagaagcattccatcctatgttctctccggatagcatgtactccggtcagggcgcggctccgagcaacggctttacagaactggcttccggtactgcaatcgctgatggtgctatcgtgttccacgattacgcagaaactggtcgtgtattcctccagaacgtttctggtgcttctgttaccgtaacaggtgctgataccgctgctctggataaagctgttgaagctgaacaggaaaaaggtactctggctgaaatttcttacggtatggctaccagtgtagcagaactgcaagaacaattcaacggttctactggcaacccgtggaatgaaatgggcttccgtatcgataagcaggttatcgaagcacgtagccgccaactgaaagcacagtactctgtagaactggctcaggatctccgtgctgttcacggtatggacgctgacgccgaactgtctgcaattctggcaaccgaaatcatgctggaaatcaaccgcgaaatcgttgatatgatcaactttaccgcacaggttggtaaaactggtttcactcagaccgttggctctaaagctggtgcgtttgacttccaggatccgattgatgttcgtggcgctcgttgggctggtgaaagctacaaagctctgctgattcagatcgacaaagaagcaaacgaaatcgcacgtcaaactggtcgtggtgctggtaacttcatcatcgcttcccgtaacgttgtttctgctctggctcgtatcgacagcggtatcactccggcaggtcaaggtctccagaagactctgaacgttgacaccactaaagcagtattcgctggtgttctgggtggcgtgtacaaagtatacatcgaccagtatgcacgtggtgattacttcaccgtgggttataaaggcgataacgaaatggatgctggtatctactacgctccgtatgttgcgctgaccccgctgcgtggttctgatccgaagaacttccagccagtaatgggcttcaaaactcgttacggtgtaggtatcaacccgtttgcgaactctcgctctcaggctccgtccgaccgtatcacttctggtatgattaccaaagaaatgttcggtaaaaacgcatacttccgcaaggtttatgtgaaagggctgtaatagccaacttttccaagagggaaccgcaaggttcccttttttattacataaataaagaaaagtttgtcaataacgcaggaacataaaatgagtgaaaaattttacacaattaacaagctggtgcgtcagtcacagctaccgcctggcctgtctaaaaaggttcttgatgaggcaaccggaacagaaacaattaacgtagctaatacccgtccggatctggtatctcttacccgtgcggtaaacaacctgatctacggtgaacttgtagcgattcaggaaactaatttacctaccgcaactctgttcggtgtgcgttatcgtaaccctaaaggcgatatgacgttttccagcgctgctacatattccggtaagtatgcaagccgcgataatatttcaaatggtgcggttggtactgcctacaccaaaggccaagttttcaaacacccgacaagtgatgttgtatacgaagtaactgatagcgtaactctcgcaggtgctgatattgatgaagcgattatggtcgcattattcagcaataaattacgcctggcaagcgaagccgcgccaacaagtcaatatgaaaccagcgaagatattagtacaacttctttcgaaatggatcgttggaatatcaacgttcgttcccgcaaattcaaaactgaaatgaccgtggaacttatgcaggatctggaagcaaaccaattcaacgcagaaaatgtgattgaagatgttttgggtactgttgccagtgaagaagtaaacaaagatatcattcagactctgatcaacgtatcaaatcgttacaacgttgatggtgtggtcacaaatggcattttcgatgctacaaccgcatacactgcaaaggatgctccggctttaggtcgtttcctgtatcaattagtgtgtgaaatggggcaggaaatgaatagaacgacttcatttgaagctacctatgtcctggcctcttctcgcgttgtaggcgttctggctgcgtctggttggatgcatgaaaccgatgaaacccacccgttagcgacagggcgacttaaaaacggttattatgtctatactgacaccaatacaccgtttgattacctgttgactggttgcaagtacgatctgggtgaaatggatcatgttggctctctgttctatacgccatacacagaagctgatcaggcaggttcgatcaagatttctgttgatcctcaatccttacagcctaaagttgctattctgatgcgctacggtttatcggttaacccatataccactgctgcaaacgaaagacttgtgaaaggtgatgactgggtaaacctctcaggtaaatctaagatgagtcagattgtgggtatcaaacttcctaaactgggttgatagtataacccaacggggataatattcaataggtggagtagggaaacttactccatcttttaataattattataattaatgttaaattagatcttgaatttataaatgatttatgataaaatttattaattataattattatagatcaaataatttttgaaatcaagtaaaaataaatttgattttatcaattagatcatgtataattattcttttaataatatattatattagatcaaataaaatttgactacaaattaatatagtatattatagatcaactgggtaaattggtgagtattttatgagtttgaaattagaagatctgcaaaatgaacttgaaaaggatatgctgatagatcccctcaagttgcaatcagaatcagcggatatccctaagatttgggctaaatggcttcgataccattcaaacgcgaagaaaaaattgatccaacttcatgcgaagaaagaagctgatgtgaaggatcgtatgttgtactacaccggaagacatgacaaagaaatgtgcgaagtggtgtatactgggactactgaaatcaaaatcgcgatcgctggggatccgaagattgtagaaaccaacaagctgatccagtattatgatatggtggttgatttcaccagcaaagcactggatatcgtcaaaaacaaaggatactctatcaaaaacatgttagagatccgtaaattagaaagtggtgcataatgtctactgaaaatgaaaaatgtgtagtgtgcaagtgtccggttccttctactggttatgtgactgaatccgggcgcgtgtgtagcactatctgtgctgactacatcgcagaaaaaacaaaaagcggcgagatcaacgaatccgatgatctgaatgaagttcaaatgttgctgtaggagaatcttatgattggatacggtgaaggaattacagatcgtgatgaacgtccggatctgttagaatctgacgaacatcctgatttttaggataggtaaaactatgccataggcatgacaaaccgattatgcgtaatgaatgaggcttgtacggggtggggttctttgcctggatctcatagttccccattacggaggcaaaacgggcgatggaggcaacaaaatcgcgtcctaaatacatgtgtacccgaaaggggcttgataaaagaatgctggatgataggcgtactcttttgcgccgtccgatggagtttaccttcggcggggtgattgataatataccttcgatcaagggcatgtgaatagaatagccagaatagtacagcactggcgttaagcaaatgtacaaaagccccttcctttcggttggggcttctttttagaacttttcttcttctccgctttcgagttcggcctttaattcttcggctcgacctttcagcgcatcgcgcatagaaatatcgtctgacggcgcaacatcaacttcttttacacgatttttgtaatatttttcaagctctttaagaccgtccatagtacggcaagaggcgaccttgctcatgaaatcatcaatagccgcctcataaagtcgaaaatcgttgaaactcttcattttaacctctaaatttcgatttgtttgatcacgtagtcaaacttttcttcattgtaaatgcgtactcgttcgattgcgtgtttcataccatagtttttgtatgaatatttatttttagcatttttggactttgccagcgttgctaagttatcaaccaaatcccaaacagtagcaagagatttagaatcatgtttacgcagtacgcgcccaattgactgtttgactataacagcagatttgcaaggatgtccgaagatgatgtgatgcaggttcttaacagaaatacctgtactcagtacaccaatagaaccgattacgatcagccccttcgttgattccgcgatccgtttcatttcgtttcgctcatcaatccccgtttccccagaaatgtatacaacgttgtcatatacctttttgagttgctcatacagccatttaccatgtttgatctgattgaacatcacaaacacgttttcatctttttcccttgccagtttcaacgccagcttacagatccatgcgttacgcctggtatgtgatgttatatacttgatttcgctttggtaatcggcccccttcattttcttaatctcatcctctttgtatctcatgaagatggtattaattcgaaggttggtaacttgaccttcctgcatcaaccgatttgtatcaactggcttgaagatttgaccaaaagcgccaatgtattgcatcatgtttgctttgccttctttcagagaaccagaaaggccaaacttgaaaatacactgatccattgtattaatgatcttctgtatgctttgtcctgttgatttgtggcattcatccaccatcaaacacatgaactgttgaaaccactcaggaggcattttgacagccgattgccacgtagacacgtagatcaatgcattactgtttttagcagttcctgaacgtattccaagcattgcctcgcgaggtaaaaggcgatagttgacaatatcaccgatcatctgatcaacaagggcggttgttgggacaatgattagtactttgcctgtgtaattttccagacaccaacgagatatcaacccctgaataagagatttacccgctgacgttgggaggttaagcacagcacggcggtttttaatcgcatggaacaccgattgtttttgataccaatacggatcaatctgcttgtttccgtcgtatactgggtgttcttctaaccacttgtcaaaatctggctgggtgatttcttctgtttcgtggatcttaggatccatccagatagaatacccgcgagactccgcgaattttgttacaagataggctaaaccgtagggcagtttcccgttatagtccatcaagtatatgtagccgttccatccaccatatttgtattttgcctggtactgataacctggcggctggaagctgaaatagtcgcgcaattcatagactatgttagcctctgcctgaatctgcacatgactagtgttaaggaatttgacttcgatatccactatgtgtatcctatatacggtttatatgaatatttataggctaaataatgataaacattggagaaatacaatgagtattgattacgaaaaggttgaaggtttcaaagccttagaacaaaaagaagccaaattacagcttgctacctacgcgcaagaaacgtttgatgttaaactgaaccgtcagaagtcattcgaaaatatgcttgctgatcttgaagctgccgtaccagcagaaaagccggaactgttgatcgactcccccgatccggaaattgttacatacgaaggtgaaccatccgttcctgatgttgttccggaaattgccgaccagattgaaattgttcccggcgctctacaagctcctgtaagcgattctgggacggtttctgatgaactggcatggatggaagggtttaccccgtctatcatcatgatgggccgctctgtttcgaatactggcttttatacgtgtccgtattggatttatgattggatgaagcaaaatccggattggtataaggatcctgatagttgtcctcattattccgcacgccaaaccctcaagtcgctggcatggtacatgcatcgtgatggtatggttactgtaagagaaaccagaaacagccagttcgacacgtttaaaaaaaataattttaaaaagtagttgaccttaccctgctattcgagtatatttgtattcgaaggcgggggaatggctctcgcagtgaagaaggaaatacaaaatgaacatgatgaaaaatgcttactacccagttctgtttgtttgggctaatggtgaagttaagaaaatcgtcaattctaaagctccttattacactgttggtgaagcacttcgccacgctgcggaagcaaattatcctgttcatgccgaacctggttatgctcgttggaacggttctaaatgggttgctgatacctgggacaactacgaagaagaaagaatggagtgtgatcctgattacgtatctcgtcaaatggaagctcatatgattgcagatcgtagactggataatgaagctcgcggattctattgattaacaaggggctacggccccttttcttttaggtgaaatatgaacttaaatcacgaatgtttaaaagatttgagcgatggtaacgagattggtaacgttatttttcttgatattgatggtgttctaaataatatgcggtgcatgaaatttggtgaacatatggacatcgaatgcgcacgacacttacgccggatagtgaatcacgctaattgtgatatcgtcatttcctctacgtggagaataggcaacagtacccataatctacgtgaaatattttatccgtggggattatatcgtataatcggaaaaacttgcactaaccttacaggtcgtcaatctgggcgtggtgatgaaatcaaagcatggatcgacaccttcggatgcaagaattatctgatacttgatgatgataccgatatgctaccagaacaaaaagagcatttcataaacactgatgggtatgttgggttaaccgaagaacaatccacgtttgcgatccgaaatatttttggtgttgcaaccccgttctgtcatgaatgtaacgggtacggtcgcataaaccagtatgacaaatgtccttcgtgtgatggaaagattttacgcctataaataccttaaaacataagagggttacaatatggctacaaatgcaactatttctgtcagcaccgaccgttatttcggtcatgatggagatacaataaatctttctcgcgttatcactggattagattcttctgaaactgttgattcccttcaatggactcataatgatactgatattcctggcgcgggcgaaggtctatataatatttcggttactggatctgctgatgctggtacgtatggagttaaggcggtaatcgatgatggttctggaaacaaaaccacgataacatcaccaaatgttactattttatacgtagaacatcctacagttagcgtgaacattgaaccaaatccatatcatgaatggcaaggtgtaaacgtcactgctggggatgatttgaatatgcctagcgagtatggatactacaaatacgaatggtggatcgatggtgttcacgacacggctaatgattctgctgaaaatggtgaacctaaatctattgttgtaaataatccagatccgaacaaaagttatgttctgaaagctgttgttgacacggcgaaatcaaacggtaaacctgttactttcgaaagtgctgcggttaaaccaacgtttaaatcggttgccgacatcacacattctggtatcaccgctgataaagaatcggcgtacaaaggcgatagcgttacgattaccgctgtgtttgaccaattccctagcggagttagtgaactttcccgtacatggcagaaagacggagtgacgatcccaggtgcaacaaatggcgcatatacgttcaccgttaacgatgcttcgagcgtcggtgattttaaagctgttgcgaaagtcggtattgacgctacaaaatccattgatgtagaatcacctgttcagactattgctttcatcaaaacgcctgtgatcgcgattactgctgatgacaatacccctgaaatcggtgatactgttcacttcacgtctaccgtaactggtgctgaaactggacacaccccgcaatcttatcagtggtataaagatggtgctgcactgtccggtaaaacgtccgcaacgctcgatgtcgtcgccgcaactgcaacgctgggtaaatacaccctgaaagttaaagtaggcgtagactctgctacagcgcgtgaatttacatcaaatgagatcactgtatctgaacaggttgatctggttgctaagtggacggttcacccgatcccgtggcgtgataccagtttcaccccgatcggttactgggtactggatgaaattctgtatcagaaagctctgggtaaagactggaaaacggattatgctgattacaaatattcagcagaagttcaaacactgctcaaagcgtttaatgaaaacggagaatgtgaagtacaagattcccgcaacggatacattcacaaaatgagcgaaatttaagaggcgtataatggcaaacgaaaaatggactacggttcacccgatcccgtggcgcgataccagctttacatatctaccttactggcttttcgatattatcgttgaagctaataaaaaaggagaagactggcgcgactattcggaagacaaatataaattggagtttgacactctgaaagatgcattcacccaatatcatgatgtgcatgttatcgaatcccgtaacggacgtctggttagtctgctttctctgactccggttacaatctcggctaaaactccgccaacgtttaaagttggtgatcctgatctggctccttcagctctgttcactttcgatccggctaaatctgctgaaaatgcagttcttactgttgatgattctggacatgcggaagttaccccatttgggtttattcatgcggtcagcgctggtgatgttgttgttactgcaacaattggtgatgtaaccgaagatgtaacattaacagtggcagcggcataaggaaaaatatgaacacacttttatttgatttcgacgacactttagcagaattttctcaggctttttatgataagttcggtgtacgtccggaaggaacgccaaaagaacgatatgacgaaatggcggcttctttggtgcgtactgatttttataaaaaccttcctcgtattcaggccgggatcgacctccttcaatggagtttccaacgccgaatcggtgatcctgctactttgctgcttcgcgcggaagcggtcagccctctttgggttatgaaagaaaaactgaactatacagataagatttgcgctgaactggggatctctcgtctcgattttagtcgcattgactatccggaacagttcgcagaacacgcctatcgtggtgttctgatttcccgcaaccagaaacatcttgaaatctggaacaattctcatctagctaataaagttcctggtattttccttgcggaaaccctggaagaaaacattcagctagtcacggaagcgcttgcaaaggctaatcaataacaagaaagggaaccgcaatggttccctttcttttacaatctttttaattcatcaagcgctgttttcttatcaccaacaaagaggattgctttacctcctgcttttctgaaaggcaacaccgcttttgcccgatcgtcaaacagaattcctttaccagcgaatgctgctttttcatggctacttttaacgtagtggaattctggaacgtaacccaatactttttgcaatgctttacgtttttgttcagcaacaccgtcagaattgaatttaccgacactggttagtattgctacatcgccaagtgttcttaaatgatggaataattcaaatccttctttgattggttccagattttcgtagaaatcagttttggcaatttttgctttgcactttttcaactcatcttctgtcatcatcgagggttcgccatacattggcacaaatgaaccttcccagtcgaacaatacaccatccatatcaaagaaaaacttattcatatcaattcctcagtttgtgtatgcatactataatgtttgatcattaatgtcaaccccaagtttcagttttcggtgcgtatgctgcaactttagccacaatttccttatccagttcagctaccgatttctgaggcttaccacgggctttaactttgatgtagtttgacttaacaacaaacatacctttattgcttgatttcttgatctcgctgtcaacaccaactttgttaaaactgatccaaatgtctccgtccatgtactgtttaagagaatcacccatgttcaggatcttcgccatagtaagggccgcgccttcgtgggtatccatgagaatttctttaggaactacacgatcgcgtttctggttctgctgcatagcaatatgcacatcgttcataacccatacgatatgtacgttttcttttttgtatcccagcgtttcgacatcacgtgcgatgcttgccagcttgctcatgccttttaacgttacgtcaaagatgaggttaggtttacgatcttctggtgctgccataataccggaataaacacggttttggtttttgttggaaatgttgaaaacgtcggcgatcacatgatggagggtagatacgttttctgggtttttgaggttcattgttttgacatcatgacccgtctgtttcttgatctctgctgcgagtttatcgctacccattacaagttttttcagggcgtcaacgtccagggtaataccttcgatgcctagcagtttttccagtgtgaaccctttaccggaaccagcaccgccagccagaataacaacctgaccgaacttaggataagcacggcctccgaaggtgatcagcgcttcggttaaggtgctttctgtgaattgtttaaatgacttcatgtaaaattctccagtttattttctattatttattgacatgttttctaacagtggtgtatggttatggtgttcgacggataggccggaagaactttaaaccataaggtatacgatatgaaaatcaatttacatcgcttcattgcagaattttcccgcgatcgcgatatggactctttcaactattactcccgtgagattgaagatcgttttgcggctcatgttggattccgtcgccaccatacccctaaaatgcgtcctgatcacgatccgaagtatagccctattatatggcaagctccgatcgatggttacgttgaagggatccggatcatgacgtttaacgcaatgtatggaaacgctttgatccatatcgcacgtgagaaaaaggcagaattccctaacggctggcgtattgatgaagtgattcaaaatcttatgcagttacgacgtgaatacaaagcgggtatgtgtctgcgtaatgaacagtatccgatgtataaaacgtatgcctatatctctaagcatctaattaattctatgttttacatcgttggtaatcatggttccgctatagatatcggttcttatgaaatagtggcttatgctcgcgaacaaggaaaggccgctgcactgaaaatcattgaatctggtgctatcattcttaaccaccgcattgatactattgcttactatggtgatcaggtcgaggttgaaggcgtacaccatgaacgattcaacaaagccgtatttactaaaaatggctatgcgtatggtaatgaaattataacttctgcggttcctctcgttcgtctaactgttgaagggtttggagaaaggatgtcttataaaccgtcagaagctcaaatgtgtgcggctgctgaaagaatcgccaaaaagcggaaaatgtataccgatgaatacctgacgtatgtcaataagacaaaagaagatgtagaccgagaaatttcttgcatggatttatccctttgatataatgtaagcatctttttaagggaggatacatgaaaacgatacattgcagaaacgaaaacgttgtttattatcacggttcttgtactgctgctggtattgaaagcatgttattacctccctgtgattctgatactctgtctgaaaaaggcagaaagaaaaatttagaccgtgttttctttaccgctgatatcgggttagctcgtatatatgctggaagggccgcgcgttctataggtggggatcctgttctgtacagggttgtgtgtccggttgatgttgtatgcatgaacgaaggcaaaggcgcgagcgtttaccatgcagcatgggcgttttgtgaggaattatgaatgataaagtgttggcgtatctcgttttcttgctgggatatcgcttagaagtgatgggcgcgtattcatcaatgtatggtgatttaacggctatctggatggtcgggttaggggttgcttttacattcctttcctttgcaattgttaatgaatcggaaaaggatattgtatgaaactatatcatgtgatctactctggtgttttaggcattgacaaacaaatgttagttgatgtaatgtgtaaaaaactcgatgaacgaattggaacccgatacaaaaatcatgtatcggaaagtattttcatcaacgttgaccatccaaacgacatggaagaaatggtcaatactcttgatgatcagcagatcccgtttgttgacaatttcaacatgagcgctggagtgtatacggtagtaacttttgttctaaaaaatgttgacagccgaaacgatagcgtgttgaatgtagttgcaaaaatcgattctaccaaaggaaaataatatgaaaattgtacaccgtagcatttccgaactgtctcaagccgaaaaagtgcaaattcatttcaaattcaatgatttgcgtaaaggttatgccgaaattgcccgtgaacatgggttagataacggcgatatttaccaggtagtacaggaaattgaacgtattcgcgcgttccgttctgcaaatctccctgttaaaaatgcaatgcgccgcgaagcgatcgaaattcatcgtaagcgtgtgtacaatttagaacgtgctaaacgtccgatgaagaaagaaaagaaacctcgcccgtttaaacgcgaacatcttaacacctctatggcgctggcgtttcaagatgcggggattatctaatgcgtaaatctgcgatggatcgttgggctagtattgctacttcaaacgtaaaaccaaatcaagccgcacctgatgtagaagaggttcgtaaagcaaaagaacctgagatcgtggcccttagccctgaactcatcgagcatcgccgccgtgcgtctgctattgaattggatctgcgtattgcgcgttcatacaatctcaagcatgaacacgccgcaaagaacaaccattcttttgaccttactctggaagattggaaagtattgatgacaactgaacgttgtcagtattccggcaagatgtttagcaataaaccaggtagcccgtatgcccgtacaatggaacgtattaatccacgtctgggatatacacaagaaaatacaatagcggttatcaacgccgctaatgccgaaaaatcacagcttgatgcattcgttaagggtgatgtcattctggatgaagtaaaagtgaagttgctgcgtaaagcactttatcaagtcgaaaaacgtgtgaaaatgaaaggttaaattatgtttacaaaatattcttctctgactaaccattatgaaggtaagttcatcaatggtgtaattatgaacgggcttactggcggtgtgtgggttgcgcgtgaaaagatccacggtgctaactttagctttatcactgatgacggtgttaccgttacccctgcaaagcgtactgatgttgttaagccagccgaagatttttatggatgttcagcagtagttgcaaagtattcccctgggatccgtaagatgtgggaaaccctcaaaaagaccggaacttatgatgatttggttattcaagtctacggtgaatttgcggggcgcggtgtacagaaagatgttgattacggcgaaaaagatttctacgtattcgatatccgtgtaaatggtgaattccttccggataatctgtgctctctgatctctcgatctcatggccttaaaatggccccgttgttgggatatgggacttttgaagagatcaaagaactgcctctcacgtttgaatcggttgtgaataaagcaaatagcggtattggtagcgatgacacggtctacggtgaattcatttatcctatctcggaagttgaagaggggaacattgcagaggggttcgtaatgaaacctgttctaccttctttcatgccaaacggtgaacgtgttgcaatcaaatgcaaaacaaccaaattcactgagaagaaagctaagaaagcaacccgctttaatgctccggtttcactgtcagaaaaagacaaaaaccaactcgatgagtttgtttgttaccttacagagaaccgtgtgaaaaacgttctttcgaaactggatctggcttcgatcactgcgaaagatttcggtcgcattatgggcttaacggttcaggatgctatcgaagaaatcagccgtaatcatgggcctttcctcgaacagttcgaagacccagcaatggctaaaaagctgtttgtaaccgaagcccaaaacatgattcgccctgtatggggcaaaatcctgaaccatgaattttaaactatgaacagtcacggaaactatagaactatttctgatgaaatagaaggaataaaagaactccttcaatacgtttccgttgatgttgtctctgggagtatttcgtggacttctccgcgtaaaggtagaagtattggtgatcctgtcggtactatgaaagacggttattgtgttattaaattccagaagaaatattatcgcagacatagaattgtcttctatgttgcaaatggatatcttccttctgttgttgatcacaagaacggtatagaatttggtgatggtatcgacaacttgcaagaggcaactcaacaggacaatgtaagaaaacagacaaagaaacgaaatagtgcttctggaaaacgaggtgttatttttgacaaaagaagaaacaattatcaagctagaatcgttgtcgatggtaaacagatttttctaggttcgtatgataccccagaaaaggctagtgaggtttacaacgaaaaagcaaaggaattgtttggtgaattttatgtcgaatgatttctgtaatgtaataaagactgccacaactgcaacgttaattggcagtcgtaaacctcctgaacgtatcgcaaacattgctgttaaaatcggacgtgctttgaacgaacgcgggattagggcttattctggcggcgctcctggtatggatagtcactttctgtttgactatagtccggataacaggtgtataatccttcctgagaacggttttaacggccttttctcaaacggaaaggatatcatcgactttcgagatttaaacacacagaaagccgctgatgaagccagaaaggtagcaggtaacttcgatacacagaatgaatacgttcaaagaaggtatgcgcgaaacacgattcaagttcttcgtgaaaatcttgacaatccaactgattttgttttattttgggcggaagaacgtgaaggatgtgttaaaggtggaaccgcgattgctgtaagattggctaggttgtacagggttccatgtttcaatctcttcaaagaaagtgtattgaacgatgtgtgtgatacgttagggatcaatataaaacccccaacgttggattttttatggtaattgaaaatgcgcccttacttcgcgaaacatacgaaagatgggctgttaataacgtaataggtgaaaatatggttcatgtacgtagtatcggtactgacggcgaaactccggtagaaggccgatctcccactctcgcagaacgagcaagagaaattatcaacgatcagaatgctaagatgatcgaacatgcgcgggatacaatcacaaaaggtgttctgaaacacgcgacacaacaaagccttatctatgatatgaagcacgatatcggctcttgtctgggtattgaatgtactcgctatgcattccaacgggtttctgaatggttggaagaagaagggctaacattcgatacagaagaaaaacgcaacgccgcgaagatcactaattctctggctagtaagtacaatcaaacgtatcgaaaccaggaagaacgtgaagtgttcggtttcaaaattcctgaaaggaaaacagatcgccgtgtaagtgaattcactttttacattagttggtaaaaagatgttgacgggggttggttatagtagtattctaactcccgtagacaagacactaactcagaaggataaacatcatggaaatcgtaatgaaagcaacttatgctggatattgcctggaagcaaaaggtgttgctaacaatggcaaaggcttacgggccaatgttgaagcaatgctggatgaattacatgcaatgtacgaatatgacaacgtagctggtagcgttcttatccaggcgttggaagttgatggtgttgattgtgctggttggtgggatgcttacattgactacaacgataaccgggtttacctgttgagcaacaaagattatttctaaggaaccactatgagcgatgaagctgaggctttagaagattgggctgattttgatgacgaagaagacggggaatatttctgcgttaaccgtggtgcttataaagaccgtttagaactccgtaaacttttatccggttcctctcaaatatcaggatccaaacgaaaaagtagtaaacaaaaagttcagtatagtgatggttctgtacgtgatgaaactgttgttgctgaattccgtggtcgggttatcacaaaagaacgacaaattgatgtaaagaacttgtatgaagtggctaaggctgctaaaataggttctgtgattgtttgtcctgtgtgcaaagaaaaacacacaaagacaacgtatcacaaagttttctgttcgaatggcagaaaaaccagtaaggattgtaagtctaaatatcacaatacaatccatcccgaacgactggatcgggtaatttaaaataaacttaaaacgtggagtacgtttatgaacaacaaaactttcgaagaactgaacagcattatcacttccgtagattcctataaggtttctcactggtcgcaatatccaactggctccgaagaggcgctgttttatattgaatctcgtggtggtaaatttgatcaagtagttacggctggctgtaaccgccttgcgcaaatcctatcacgtccggtgactatggaaaacgtagattttgctaatcggttgtacaaaatgcactttgggcgcgaaatcttcaactacaaaggttggaaagaaattgcagaactgggttacatccctcttgaattcagagcgattccggaaggaaccccagtagcggttaaaaatccggttgcaactttccatgctgggaaaaatgcgctgtggttagcaggacacgtagaaaccctggcgatcaggggagtatggttcccttcaaccgtagcaactctatcccgcgaatgtaaaaaagtgttgaagaaatatctcaagaaaacctccgatctcgaaggtgaagcatttgatatggtattacgtacccgtttgcatgacttcggcgcacgtggaacctcttctgctgaatctgctggtattggtggcctcgctcacctgtataacttcctcggtactgataccgtagaagcgctgattatggctatctctctgtttgaagattgtcagaaagcgtttgatgatggtgaaatggcggctggtatttcaattcctgctcgcgaacattccactaccgtttcttacggcaaagaaaacgaagaccttgcatacaaaaacagtattgagatcttcggtgaagggatgtatgcatgtgtgtatgattcctgggattttaaagcggcggttcgccgtatcgcagaatataaagattctattctttctaagggcggtactctggtagttcgtccggattctggtgatatggtagacaatatcatgtacgctcttgaagaactgggccgtatctttggctatacagtgaactcaaaagggtataaagtactacacccagcagtaaggatcattcaaggcgatgaaattcatggccctgaaacaatcaatcgggtgttgaactggatggagtctaaccgttgggcgtctgaaaacatcgcgtttggtatgggcggcggattgcttcaagaagttacccgcgacactcaaaaatatgcgatgaaaatgtgcgcaatcaaaattaacggtgtgtggactggtgtgtataaatgtccaaaaggcgctgaatggaaaaagagtaaaaaagggttgttgatgactatcactgatggtgttaactttaaaaccattgatactctggaacagaaagtgccggaaggctggaaagatgctatgatcacatactatgtcaacggaaagattactgcccgtgacactttagaggaaattaggaaccgtgccgggatttagtatccgcaaaaacgacaaaggaaccgtgattttctatgacaacatgccccttgtagctcgcaaggggctttttgctaaaatcgctgggtattcctttaaactggaagaagtcaacgacgaaacactaaaagagatcgtaagaattgccttacagttaagaggtaagaaagacgaacaaagagctattgacatgatcaataaattgggtgaaactcaatgcttcatagtgaatcgtggttacaagtacgataccattgcaaaatttgaaaaagggctttgtgaattatgagttattatggtgtgatcccatacacaggaaacaagcaaaagctacttcctgaactattcaaattatttccagacagaaacagctatatgcgattcattgactgtttttgtggtggtttgagtgtgtcactaaacgtccctaaacccgttctaagcaacgattacgatcggacgttgattgatatgtataagcgccttcaaatgcttcctgacctctctccggtgcgagaattgattaaacaacatgggttgggtaagaacgagaaagaagcgtatctcacatttcgtgatgcatataataagaacaaggatcctctatggctctacgttctgatcctgcattcgtttagtaatgttaatcgaaccaacgataaaggcgattttaacgccaattttggttgtagaacgttgaatgattctaccgttaaacggtttgaacacttcaaaaacaatgttcggggaattgaattctctagcgcatcatttaaggatcttgatatctgcttgaatgattttgtgtactgcgatccgccgtacctgatcactgatgcagtttataacaaattctggaacgaagaacgcgagcatgaattatatgattttctcgataatttaaactctaatggtatcaagtttggtttatcaaacgtgacacatcatgcaggaaagcaaaatgatatcctgatcgagtggatgcaaaaatataatgtgcataacctcgataaaaagtatctgttaggccagcatactgattcttacgaacaaaataaaacgcaagaagtctacgtgtgcaactaccagaaacgcgacgtaaatacataccctgaaacactggatgacttaatgtaaggtaacatatgtttaagatttttggttatatcccttctgtttacaattgcgctccatgcctgaattctaaacgtctcctggacgcaaaacgaaaagaatatgagtttgtttctgtagccgatgaaaaagacgcagacggcaaaccgatcctgaatgaaacggtcatttctgaactcgaaagcctgttgggtactcgtagactgaccatgcctcaaattttccacgatggtaagcacatcggcggctttgaccaactgcgtgagtacgttcgcacgttgggataaatattaacacctttatttgattggtgttattatgctcactaaacgtattactaagaaagattatccatccattaaacaagctctttttgaacagcaaaacggcttgtgcgcgttatgtggtcgccctttagagggtgaccttgaaaaacatcaccttgaccatgatcatgctctatctggctctaatgccggacgtgtgcgcggcctcctatgtaacctatgcaacggtacagagggtattgtaaagcacaaattcaatcgttctggtctggtttcccgtgatgttgattacatcgaatggctagaaagcctggtagcatacctcaaacgcgactattcacaaaaccgtatgcacgacaaatttatacccgataaggttaaatggtttacacgcctgactaaatcggatatgatagccgaaatgatttctatgggctttgagtactcagaaactgaggatcgcaaggctttagcaaagagctatagaagacaattaatgaaggcaaccaaatgaaagtagaaaaacgcgacggaacaatcgtcgatttcgataaagaaaaaattcgtaatgctgtgtataaagctggcggtacgatgacggatgctgactccgcgatcatgcaggtacagtacagccaaatccgcgatttttgtccaatgaagatttcgcaaattcaagaacttgttgaagaatctttgatgaagacaaatccgactgttgcccgtgcatatatcgaatatcgtcatgatcgtgatatcgcccgtgaacaaaacggaaaattattccgtgatatcaagggtttgatgactcttagtaacaaagaattaaccaacgaaaacgcaaacaaagattctcgcgtattcccgactaaacgcgatcttctggctggtatcgtttctaaacatatggcgcgtaaccatattctaccgaaacatattgttgcggcgcacgattccggtgatattcattatcacgatctggattacagcccgttcaccccatacactaactgctgtcttgttgacctgaaaggcatgttagaaaacgggttccggatgggtaacgctgatatcgaaccgcccaaatcaatcggtgttgctactgctcttatggctcagatcaccgcacagattgcttctcaccagtacggcgggacaacctttgcaaatgtcgatcaggtgctggccccttatgtagaaaagacctttgctaaacatgttaaagatgcacgcaaatatcaagtagctttagtaaaagattatgctatctctaaaacagaaaaagatgtatttgatgctttccaatcatacgaatatgaagtaaacaccttacatactgctaacggacaaaccccattcgttacgattacttttggtatgggtacgagtgattttgaacgcatgatccagaaagcaattctaaaaaaccgtattcgcggcctgggtaaagagggcattactcctgtattcccaaaactggttatgtttatggaaaaagggattaaccttaatccggaagacagaaactatgatattaagaaattggccctggaatgtgcttcaaagcgtatgtatccggatattattagcgcggctaataaccgtcgtattactggctctagcattcctgtatctcctatgggttgtcgtagtttccttagcgtgtggaatgatgagcacggtaatgaaattcttgatggacgtaataacctgggcgttgtgacaatcaatcttcctcgtattgcgattgaagccgaagcacaggaagatgaagacgcgcatgatgcattttggcgtatccttgatgaacgtctggaactgtgttttgaagccctgatgacccgtattgatagtctcagaggtgttaaagccagtgtagccccgatcctttatacagaaggtgcgtttggtgtacggttgaaacctgatgatgaaattctggaactgttcaaaaatggacgcagttctatcagtctgggatacatcggattgcatgaaactctgatgcttttcggatctggacagcacccattcgaccggatcggttctcagaacatgggtagactgattctggaatatctacgcgctgcgaccgaagcatggaaaaagaaaaccggatttgggtttagtctgtactcaacccctgctgaatctctatgtcatcgtttctgcaaactggactatgagaaattcggaagtatcaaagggatcacagataaaggctggtacactaacagttttcatttggacgttgaccgcaaggtaacaccgttcgagaaaatcgactatgaagccgattatcattacattgcaactgctggacatatcagctatgtagaattccctgatatgaaaaacaacctggaagcccttgaaaaagtctgggattatgcaatggataaactggactacttcggaactaaccttccggttgataaatgctttgaatgtggatcggatgatgaatttaagccaacggaagaaggttttcattgtacccattgtgggaaccatgatccggaaaaaatgagcgtcacgcgccgtacatgcggctatttgggtgctcctgctgtccgtgggttcaacgaaggtaagaacaaagaaatgatgcatcgcattaagcatcaaaattaatcaaaaagcccttgacttcggttgagggcttttgttatattgggcctatcgaaaaaggagacatactatgaaactgactaagaaaatgaccgatgtagtggcatgtgcgtttgcattaggctacaaagttgaaaatcatccaactcgcgttgaagtcatcaacccgatcaagggccgtcctgggttggtgctatgcgaagatggtacagcatatcgtaatgatgtctctttagaactggcaactactatccgcaccgcaaaacaaatgaaagatgttctcattagcggcgcaaaattgagggctttatgatgtattggacaaaagataaatttgtttttcgtgataatacgtgctttgggactgcataccgaaacttagctattcgtggcggatcgttatcagctaatgatttatctaaagtagtatttcctattaaagttacggagtgtgacttattaggtgttaaaggatttactgattactttggtacaaagtgggaatcagaatcttacatttttactaataccgatcgtgaattattcaaaaagcacgttgttgttaaagagaaaccgttattaccaaaagaagatgaagcaaaggaaatctatgatctcctgaacatgcttgataatctcggtacttgtcatctgttcggtaaacgcgcccgtaaagcgaaagatgttctcaacctgttacgctctcgccggaattatctgatccgggaagcggaacgcaatctgaaaaattcagaaaaacaggctgaaattcataaaactacccttgctaaactaaaggctttgtgatgtttccgttatacgctaaagtgcgtcgaaatgtcggtgattcatatcaggaatggagtgaatggctacgcgaaacgaagtcattctacatttcaaaagcaactgatatgaaaggccgtaacattcgctatcgtaaacccagtggtaaacgagtgaacgggatagattacattgttcttgattcgattcgggatgatataaaatgatgagcaagatccttgataagttatttccttcccgtgttgttgaacgcgcgaagagacaaaatcgttttcagaacgctattgactatctcgaagaaattcgatttcagaaattccttgaagataaaaagatgcgtgaagatgagaagcacccaaattctaaaatggctgatggcgtaacaaaatgcgcggttggtcggacgtggaaacgaaaagactacaaggatcttgtttctgctataccacgcggaagcctggaagattactcaaaagcaacgggcagatcttataccggatgccttaacagactctgtatgattggtgttgttaagagaatgactcctacgtataatcatgtttatatggctatcgtaaagaaaagaaggttgcaattctatgcagcatctggggaatctatcaatctgattgatgatttaattgaagttgggtatgtagacgacgggaaaattttaaaagctcctgattatctacgcggtaaactattgaaataggtataaattatgatttttaacaaaacaaattcacgtaatttgaactatctacgctgtgaactggaagctaacgaaattgaactgtttttctgtggggctacagatccggaacacaaattgcattgggtatcaggtgagattgtaagcctaaccgatcagattgtcgaagaggctacccgccgcgatgcaatcgttaaaattggtgctgttgatgtgaactacgaaggacatccttcatttttcattcaatattatccataaaagtattgacctgtatgtctgaatgtagtaacatccttcttgtcaactaaggaggatgttatgaaaatcaaaaacactgctactgaaactctttgcaacgaaattgcagaaatgtactggagtaaaggtcacttagaggctatgaaagagtttcaaaagtggtgtgatgcccaaaagttagctaaatgggaatacatcgttattgttgaacggatcaaagaactgatccttgtgaagaaaggtaacatgaaatgattcaactgaaattagacacaaatgcggtgttaagcctgtttccggaaggttcaaccgctcgcgtagatctccaatctgctatcatcaaaaacgtggtgaatagcgtagttggtaagcgtgttagcgaagaaatcaacaaacggatccaggaacagttagctgttctaatgccgaactcatccgaaattacacagacaatcaaatctgaattctcggattacgtcgaaaaacgttatgggtatgctaatgttttcgatgtcaactatggcaatgttcgcgaactgtctggtaaaatcaaagaatcggtaaaacagcaatgtcaaaccattcttaaagatatcgagaaagaggcgattgctcatgcaacagaaaacattattgcagacgaagccgcgtttatcgctcgcgtctcgaataaccttgaagttactgtacgcaaagcaataatgcaacgggttaacactcagttcccagacattattgacgatgcgatcagagaacgtctgtttggtgaaaaagcatgaattacgaccgcatctataacatggatgtggtcaacggaaaagggatccgtgttgttttgtttgtgactggatgcaatcataaatgcgaaggttgttataacaaatcgacgtggaacccttgcaacggaacaccgtacacggaagagacagaaaaccatctgatttctctgttgagtaatccgcatgttgatggacttacattaactggcggcgatccgctttaccgtgacaactatcctactatcctaaaactgcttgagcgcgtttctaaggaacttccaacgaaaaacgtatggttgtggacaggatataccctggaggctttacaggccgacccagaacgttctaagctacttccttacattgatgttctgattgatggtaagtatgaaaaagatttaccaactaaaaagccttttcgcggctcagataatcaacgtatgatcgaattcgctaaaaattcgatagaaattaaaaatattgcttgacctaatgtgtaactatggtaatcttaccacatcgtaaatgacgattaactttaattgagagataatatcatgatcctgaatttcaaaacccgtaaagaagcgcgtagctactgctggaagtggaacattcccctgaaaaccatccgtaatacagggcgcggttcttgcccgtggacagttcaagcaaacgaactgaaaacgttcgtggttggtaaaacttacaaactggttgaccgtgaagggtttactaccaattcacatggcggatctaacaccgcaaacactatccaggcgacacagatcgaaaaattcctgaataacgaggtaaaaattatctcgaaaaccaattcagatactttcaaaattgagcatactccggaaatgacttttagctctctgcgttcgtgggaagctcgttattttgtcgaagttggcgctgctccggttaagaaaacgaaagctaaaccgaaaaaatccaacgttacggctccggtcgcacctgttgcgcctgtaaccgcagatcttgatcaaatgcttgacggtggttcggcgatgtcggttgaactggatccgactaaatttgttgaaggccgttcgtatgttctggtgaaaccgcagcaatttaaaaatcgttgtggtgctaaccacgggatcaaatcatatactgatgaacatagtaatggcgtatacaccgtttaccatacgacttcgctcggtcatcatcaattgagcaaaacggtagataccattgattccccgaccggaaacgttggttactatctggttgattctgaacgttcgttcttccgtgaactggcgaccgggactgttgatgaacctgttagcgtttccgctaatggcgctatctcgatcaacgtagacgaagcggctaagaaagaagaaatcgcaaaagcaatggcacagcttgaagaagcggttaaagcccatgatgacgcgcttcaaaatctgcgtactgcttccgacctggttcgcaaagctgctcgaaaagtagcagaagtaagcaagtaaattaaactgggtgctccggcacccttttttatgaggtgacacatggaattattagcaggtaaatcttacacactgaacatcgacgctaaagaatttgcagaaaaaacctggagaaatgctttagctgaattgatcaaaaataacggctatatcacaatcgatcgtactgcgattggggaaactgaggacattgcttatgttctgcaagatgattttgaatacgagatccctagtcatctatggaaatatttcaaaccatattatttgccagaagaagaaccacggatcgcgacgaaagaagaagccgccgcgcctgttttaaattttatatattccgatcctaaaatgtggatgactgctaaacctgttcaacaagatatcaatgatctgcgatttgattatccttttgtcaagcggattacttcaatttctgtactaccagcgccgactgattcacaggcacttgaatttgcattacagcatgttttcggtgataataagctgtacgcgattgacaaggaagctgctattgatgaacagaaaaaggaaatcatcaaccttctttctctgcatcaacaacttgaagcggtggaattgattgagcgtatgctttctgatacaaagaaagaaatcattagcaaaatcaccccggcacgaaggaaagcaattgatgaaaatcgagatttacggtattcccgaatcgcttcataaatgttacggttgtattgaagctcggaaattacttgatgagcatggattagagtacgaattttattctgttctaaagccagcaaataacagcgtggggtttgattacgatcggccccgcattgaagagttagcgaaacgtgttcgtagtcgaaacatggcatttacttaccctcggatctttgtagatggtaattttattggcggttatatgcaattgaaagagtatttgggtgaagcatgaataaagaatacattcgcaaagtagcaaacgctatccacgcaacaacgattgattttctggaagggtttgatcatattatccatcccgaaacgttggatagttgggaagccaaactgtttaaaagcatcaatgaacagtttccggaaaaagttaaacgctggtttgtcagacaggaaatcgtagcaacgatccttaatgagcgtggtgttgaggcgttcggtgtaacccctctatataaacgaaaccagattacagacgaaacaatcaagaaatataaaaagatggttcggaagtaataaataatcagttaaatggccttcgggccattttttgtatataaatattggtattgaatacaatataggaaaaaagataatggtagctaaatcattccgcgcacgaagtggccttgatgctgctggtgaaaaagttatcaacgttgggaaggctgatcgtaatacgctgagtgacggcgttaacgttgactttttcaatgaatttaacggaatccagcagtatgacccgacccgtggttattctcaagacatggcgatcatttatgcgcgtcgtatctggtacgcaaaacagaatattgcttcccctgctggggctttcgacgaatccaaatggatcgcaactcgtaatgacccgaaatgggtttatagtaacgtaaccactccggacggtagtattatcgattctggtagttacattatggctgatgggcgttttaccgaacttctgtacctgctgccggacaacccgacagaaggcgacgtgatcacgtttaaagattgcggtggtttggttggtgtaaacagtatcctcgttaagtctaacactcgtcagatccgtttacgtgcggtacaatcagcgcaatatagattaactcatccttacatgatcgcaacgtttatctataacggtaacgtgtggcgtgtttctgaggcgctggataaccgtgattctgaaatagtaaatgcaaccggaacaggttcattccagttacaatctggcatgacagttttccgtaatagcgctacaggtaaaatcactctccagttaccaaaatatgcaaacgacggtgatgtgatcacaacctacgacgctgataaaatgaactctatcaacgtagccgttttgcagatatatccgggtagcggacacactatttctgatggtgcaagtactggtgttacttcggtaactagccagaaatccggctttggcatgttcatctttgatgcacagaatagccaatggaaagtatacgatgcggataaccgtgttcgtctacgtcgtatctatagtgatttaaacgcagttccaaatgattatgtttttgttactgcaaacccttctggggctgtaccaaacgttactgttactctcccaactgatgttgctgatggtgaccgtgtttacgtatccctgtatatgatgggtaaaaaccagaactgtacaatcaaagttaaagatggtactacggataagatccgaaccaataaaaacatgatgcagttcccgcagcgcaaagattatccgcccgatgattggtttagcgtaacgtctcttgcttttaacgcaggtagcgattacctcccttatatcgagttttcttacctgaaagctacgaaagaatgggttgttgctaactatcgtccgattgttgaacgcgttgatgcaacaaaccgtactcgtactggtgttattgctctggctgctcaggcagaagttaacaaaaacctggaagataacccgaacgacgaaacggctattactccgatgacgttagcaaataaaacagctactgaaacgcgtcgtggtattgcgagactggcaactactgccgaagttaacaaactatctacagatacctatctggatgatgtgattgttactcctaagaagctgaacgaaagaacagctactgaaacgcgtcgtggtttggctgagattgcaacccagtcagaaacaaacggaagtaccgatgacattacgatcgtgactcctaaaaagctgcataatcgtatcgcatcaccaacattaacggggatccttgctcttgttgcaactggtggtactgcaaacaccaacacagaccgtgctcaggctggtactggaatttacgatcactcagattatcaaaaggcggtaacgcctaaaacactgcgtgaatataaagcaactgaattacaatccggtgctgtatggctggcaaacctgaatgaagttattaacggtactgttgcaagttctaacattccgaccgtcgttactccggaaatgttacacaagaaaacttctactgatgcgcgtattggtttgatcgagatcgcgactcaggcagaaaccaacgcagggactgattacacgcgagcggtaacgcctaaaacgcttaatgatcgtactgctaccgaaggtctaaccgggattattgctattgcaaccactgccgaagtatcagcaggtactgtaacgaataaagcgatcgtaccgtctaaattgaaaggttatctggacgatacaagtcatattactgttgctactgctgacgggttaactcaatctggtactatctggactacggttaacatcggtattcaatcagcaactgaaactcaacgtggtactttacgcgttgctacgcagtctgagacgaacgcagggacattagatacagtatttgtcacccctaagaagttacacgctaagaaagcgactgagagcgcagaaggtatcattcaggtggctacggctgctgaaactaccgctggcaccgttgcaaacaaagctgtttctcctaagaacttgaaaaatacgattcaggttgatacttcatggcaagctaccgatctggtacgtggtacggtgaaactgtctaaaggtgctggtacttggtctggtaatgatgtggctggttctactcttcctgatgatggttacgccgctgtaggtgttgctgtttctccgtatgaattgaacttaacgctgaaacattatctgcctatcggtgctaaagctgttgatgctgataaacttgataatctggattcttctcagtttattcgtcgtgatgttgcacaaactgttaatggtgcgttgaccctgacacaaacaaccactgtacaagctaacatcaactcaactgctgatgcatcttttcgtgtgatgaatgtcaacggtgatttaaacgttggcgacggttcgtcgatgggtaaacttcgtctgaatggtggttcggctaacgactggtctattcaagccagtgctgcttctgggcgtattgcgatgatttcgacgggtaatactagcacagttcatctttctgtgtataatgatactcgcggcgttgtagctaacgttaaatttcaggctcctgaaattcaggcaactagcaaagtgtctttaggtagtgatagcgttatttctgcaagcggttctaaccttttactgggggtgaacagtaagacaacgcagatcaatacatccgatgcaggtaacattgtagcggctgaatctgggaactcttacaaagtctttactgagaagaacgcgcaaaccttgctgaatcctacgtatgtacgtaaagcaggtgatacgatgtctggacggttgacaatcaacaacagttctcttatcatcgcaggtcaagcggcttggtcaactcaggatgcagtaaacgaagcatcacggggatactggacagcagaaattacctctgctgcacaatacaacttgcttcctggttatgcggttccggttctcgaaccagatccgattaatccagatattatgattgtaacccgttatacctacgttaaagcacctggtacgttaactcagtttggtaacggaaccgcatacacttatcagatttgggcacctcgtccgacctctggtactggtgttaacgcgttggcgcaatccttctggatccgtcaaatgaatccaattacaggtaaatttgatgaatggggccgcatgtatacgagcaacaacccgcctactgctggtgaaattggggcaacgtctgctgttggtactacggttaaaaacatgactgttactgattggatcaaggttggtaacgttaggatttatccggatccggttactcagacagttaaattcgagtggatagcataatgtcaaacttaatggcggggttcggccccgattttgtagaaacgcaaattctatcagaatcaaacagcgtaacttacagaataaccgcaaaggcaacacatcctaatgcggttcctaatcagtatgagtttacactaaatcaaaaggcggtagggacaccgcctagccctgggatcaacgtatggcgaatcaataacgctaatgttgaatcaataaaaacctttgcattatccaatgacaatacagcaactgcaaataaagcatttgttgattatatgaactctcaaggttctgggttgtatttgataatgactaacggacaatataaaacaagccagatcgttgatgattggtttgcaaaaaacaaatccgttatgtggcagggtgctgattttgctcagagattcccaaattccgcatatgttgcattgtatggggccgcaaaatctcgtatactgattgaatcattttacgctaatgatggagttttaaaagaagattcacgcgcatcaatcgatcttgtctatgacaacgttggtgatgttgggcgaacaggcgtacctttccgatccgttgaagatgttgatgagtataattcaactaatggatctgaatataaagtatatccggttgcaaacccagttatctctaaattggctgattatgggatggctcctggattagttatgatggttactggtgatttttacgccagtaaagcattattggatgctggttcaacaacaagggttactgttagatggtttactggtactgctcaaacatcatcttcggtgattgaagttccggcaaataaaccggatgaatggttgcgttttgaacaattttacacaatccctagtggttgcgatggatttaacgttgctgtatcgcgttatcctaaaccagctactgatagtttatcagcaattcgaaattttgtgatggttcaagtgtctgcttccgaagcaaatcaaaccgttgctgctcagtttggtgttaacggtattaaactgaataatgctatcgaaggcggcactccttatatctttgaattgcctaacgttaacgtttatcctagtggtgattattctgcttccgaattccgtgaagttgatgcataaacaaaggcccggatcatcgggccttataaatatgtaaaaaggggttattatggcagatttaaaagctggttctacagtcgggggtttacctatttggcactccggcacatttccgctggttccggttggtaatactctaacctatcgcggatataaggtttatactgaaaacgataaaccacaagcatcaaataacgacttcgtttctaaagcaagcggcggtcaatatttgggcgtagttgccttcaaacaggggctacaaattaacgctactttcacgggtggaagtgaccagaacgggttatattctggagatggtgatggcgctacatacgataaagccaacatggatcttgtatcatggtatggcatcggtattcgatcatcttctggaacaaacggtcgcgtattagttatcaatgctcgcacaggtgatgttaatactaagggtaacgtgacggttgaaaaacaaatcagtattacaaccgctaaccctactgacgcaagtcatgcaacacgaaaaagttatgttgatggtcagataaatactgtcacatcaaatgctaatagcagggtattacgcgctggcgatacaatgacagggctattaactgccccgcaattcgcgagcacaggcgcggcttcccgtcccgaacacgtaccacggcttgaccaggtaattactaaagggactatcatagattttggatcttattaaggtgaaacatggctgatttagcaaaaattcaattcctacgtagcacagttgcggggaaaacacctactacaagtcagcttgcagatggtgaactggcgatcaacatggctgattatgccatttacacgaaaaatggttcttcgatcgttcagttggcgggtaaaggtatcccagaaacaaataccaaaaaattaacagtagatgggcctagtgctcttaatgataccgttaccgtagcggaaggtaaaacaatcacttttactaatgccgacctaagtggtaatatggttcgccatattacaggtaaaaatgcccttaacgatggttggtatattggttctggtggtgtgagtaatgaaggtttcttagaaatcggtactattgacgatggtaatgaagagatccgttttgttactcgcggttctgccgatactattcgccgtactctgaaacttattgatactggtgggaacactcgcgtacctggcaacatctatattgatgaagctatgggtggcggcggttctgcttttatctctaaaaacaaagcatttttcggggctggcggtgctgatatctatatgcgtaacaccgctggaggttctactaatcagttaacgatcactgatgctggtgaattgctgtttcaagcaaaacctgtatactgggacggtcgtaaaccgactttaaccgaattggggatcgggcggattgaaaacgcgcgtcaaatgcagcaagacaattggcctataactacaggtaatgaaacccgatgggttaaagttgctcttttaaaagatccggcatccggtcagagtcgcttgcaactgatggtgactaacggcggtaactatggttctacacgcggctcgttcgattttatcgattgttctgctcgtagtatgccttcaacattaacggctgcaaatattcgttcttatctgcaaattcgtcgattgggcgatccgtcaatggatgacactaaccagatgcgttatagtttggttcgcacatccgaaggtttggaattgtggtttactcaaagatcgttcatcggtagtacaaaaattgctctgttatctacggctggcgtgactgaatattatattcctagtggatatacatcacaaacaaccgctccggatggtttgatcgagagtaagcctattcgtatctatgacgaaatgaacaaacctagccttgacgatggtactgatggtattctgtctgtcgctaaaggtggtacaggtgcaagtacagcggctgctgctcgcacaaacttaggtttaggtacggctgcaactcgcgatgttggtacgggatctggacaagtaatgctcgttggggcttacggtttaggtggtaaaggtacatcgtacaatatatcaaccgcacgtgattatttgaaacagttacgtactgatggctctcagttcatgagaaaccaggttggcacggacgttaactatggcatgggtgcaagtttttatagctctgtatctgatgtacatgctattatttcggttgattgggctactggacgtgttaaagttggcgcaactaacgatactaaccttaactcagatactgggaaaatttctttccaggaactgtatggtactgcgaataaaccaactccggatgatgtaggtgcggtttctcgtactggtgatacaatgtctggtgatctcctgatcactaaagcatctccgtctttgcatcttaatgctgcgggtagcggtaactcggtgatctggtttaagtacaatggcaatgaatctggtgttgtttgggctactccaaacactgcaacttctggtgaagtaaggatccgtgctcgtacatcaacaggggtaaacagcggggaatttgtatttaagcatgatggtacgatggtatctcctggtaacatcactattaccagtggtgcgtttaatggtaaatccgtcaatacgcaatatggtaactttaataacacaagttcaacaacaactgaacaaacagtaactattagcggttcgcagcacaccccgttattactgaatagaccaactaactcaaacttatctattgggttcaaacttagcggaatgaacatgaaacgtttgggtgttgatgttaacggtgatattcgttacggggaagcagaaaaccaaaccacaaacgcatggttactaacttctgatacggtaaaccgatggtctgttaactttggtcgagatatagcggttgctggtttggttaactcaactggtggatttaatggcccgatttctgcatatgatttgactggcgttactcaggatctggatgcactaacaatcaactataccgatccgggacatttaaaaatgtattcgtgtcgtagtatgggcggtggtgataatatcacaaacaaaccttctggtgttggtggtaacttcatcatgtatgtcgagtgtattcgtaaagtaaacaatactgattatactaaccgtcaaacatttattgcgtcagataataaacgcacatgggaacgttggcttactgttagcggttctactaatacatggacaccgtggagagtggttgttgtatcagggaatgatgacgatgtgtcatttaaatctgtgacaactactaccggaaacttgaacagcggtaatgatctgattgttgctaacaacgctcgtataggtggcaacttaggattagctggtgcgtcttctgtcatgtatagtgataagggtattgcgatcggtgctggtactgctctgttagaatcttctgatgggcgtgctattgtcggtagttctggcggtggtcgtgctgttgaattgcgtccaggtggcccaactcaaagcaataacgccgtgaagattacagcaacttctggaagtggtggtgataccgcgatcgaatacggtcaaggggtaaaaatccgttctaatgctgctggtgctcttattatttctgcgaaggcaggacaggctctatatctgagaccgcaaggggatacttcaagtaccaacgaaacccgcattgatgctagtggcaacatgactattaacggttctgttactgctaacgggaatctgtctgtttctggtactactacaataaacaacacgctaactgttaataacgtaggggcaatcgagaaacgaggcattaggacgtatacagaaggctctgttactgtcaacgaaactgacggtatcaagatgtttggtaatggcacaattcatggcacaatgcgattagttgagagagtgaataatactactttcatcggtctgcaaacttccattaatgacactacaaacggttggtttgaattccaccacacaggaaaattcaaatcaaacaatatcgaagcctctggtaatattgttagtttgactggttccattggtgctgttggtgcattgactgtaacggctccttcttctgataacggtactgaccatatttggttccgtaactctgatggatctgaacgtggtgttatctatatgccaggcaatgctaatattggcggtttccgcgttcgtggtgtggaatggcaatttgatggcggtgctagtcagtttatcggccctggtgctcgttggcgtattcaccctgatggtaatattcaggctgatgtttttagcggttatctgaataactacatcaatgatcggtttaacgcgtgtgctcagtgggttcgtactggtgctcaacaggactttggtcagatcggtcgtcctgctcctggtttaacagttcctgctggttgggttttagttggtcttaacgccaacggtaacgaagctaaccagaacatgcagttaatcggtggtcgtttgcaggtatggaagaataacgttcaatgggttgattctgcaacttgataaaataggggcttcggccccttcattcttaaaggtaaaataatgattgttaaacaaatgaaaggtattcgctggcatcataattttgaaggtggtgcttactatcgtgattgtaatgacaagtgctggtatgaatttcgtaattctttggataaaaattcccatatcattatagttgatgctaaaaccaataaaatcattaactattataacggtgatgatcctacgatgattggattgtttgctgataaagaaatgattcttaatgtgtatcagctatcagaatttcctgttaatgactggggagaattctctaagcgagaatttaagttcgaagatgataaggtagtcatgacgaaagatgttgaacttccgaaatctcgaacaaaagaagatatcatggcagatttgataaaacttcaaaaagagctagaggtaatgtaatttctaaggctacctatatggtagcctttttgttgtatgctaaatatacctatagcaacctaagaagagtcttataaaatggctgagagaaatcccgtagataaactagccttatttgatcgggtaatctcgtttgtgatgggtgtgaaaacatggaaacaattgctgataaaaataattctaataatggttatgtttcttatggtattaacttggtacaaatggactgatatattcccgatgataaaaggtgcccttgtagtcgatacaagggctatcgaaatggaacaaacagaaaagtttaataaatccgcgttggaacagttgagcatagttcatcttacgtccaacgcggatttttcagcggttcttgctttcaggccgaagaacataaactattttgttgacattgtagaatatcaggggaaattaccttcccagatcgatcctaaaaacctcggcggttatccgatcgataaaacatccgacgaatacacgaatcatataaatggcttgtattattcatcaactaaagcaagttcctacctaccgacacgtgattttgtgccagtagcttatacttttagttgcccttatttcaatcttgataactactattctggatcggtattgatggaatggtatgcaaagcggcctgatataccagatatgaagctaaacatcatatgtggacaggccgcgcgcattttaggtcgagcgaggtgattaacgtaatgctggtgttaaattgtgtgatcttccaatagcccgtttgattgctttaaagaagttcatcaccgggctatttttctcgtaaatatcccaaactttcaatttgtcccacggatccggaacataatcttcattccttgccgaaacccccaacgtaacccgcctgtatccagcgctgtcgtgataatacacgaagaatggcctacctattggcgcaaccttacaacctctcttagcggctctcatagcctcatcgaacgtcatggattcccccaaaaatttctatatgtgaatggtcgaattccgatagtttcactcaaaatgtatatcggatgatctagctcatcgtggttttcttcgtcaatgacgatatcccaatcagtagccttttgttcttctaccgtggcaatgaatacctggtttacttcacacttgcggtgtgtacgtctgatgattgtatccccttcacgaaacacaatcatatcagggttggtagtacggtacgcggttttacccgcgcacacttcattaagcatatcttcgtatgtcattataaaacctttacacgttgaacgatggtttgtttaacgtctttgtattctccgtgctctttaacggttgctttgaaagtgatttcatcaccttcgtttgcaatgttattaccgaagtaaacaacaacattaccatcaacattaattttggtcatgaatctttctacagaagtgtagtaagaaacttgagtataacccagtgagatcactttctcaacggttccggtcatttccagacgctgtttgatttcaccgatgtggttagctttagaaatgcgttcctggcgctcttgttcccactgttcgcggatttcttcgcgtttggcgatataatccttatccagtgcaacacccatgcagtaagcgcatacagcgtcgaatacagggctgtttttgttgtcttctttagactggtcagcccaccaaagaacagtaaacattggcatttctgcaatcacttcacctttacgcttgccaattggcatgatcccttgttccagcagttccagtttttcagtatcaaacactgacagtttaccgcgacgttcgaacagatcgaaatcggcgaagccctggaataccattttgaaagtatcagtttcagttaaacgggtcgaaacacggtcgaaatactcacgcgctttcgcttccgctttctccggatcggtagataaattgcaaatatagttatcagaagtataaccgccgcctctacgttcaacacgcaaggtgtacattgcatttttacgaccagaagaaatgaagtaagtgttggtaactacggttgcgttagtcatggtatttctccttaaaaggtatctcgtttcgatatggctaatatagcaaaagcccccgaccgaagtcaagggcttttttcatttcttacgaaattataagaagaacccagtacgaacaatcagatcgattttcttttcaggttcaaacggtgatttgctatcgatgttacactgatagaacataccaacatacttttcaggaatgttagattcacgcgcccatttcaggttgtcatcggtgatcggccccagcataagattaacaacatcaacagcataatcctgttctttggtgttaccggaaccgtttacataatgcccgtgagcggttttgaggatctcaattacttcgctatcgtcagtttctactttgtaaagtgttgtattttcaggaatttcttcaagaatgattaaagcggttttcatcacacttacctttgtgtttctgtttacgttttgcttctttaaatgctcgcttgcgatcgcggtgagtagaagcgcggttgaaatcatgttttgctaccaaattattcatataagccccttaaagaaaaatatttaggggctttcgcccctgtatcaatccagcagtttgcggatcttatctgcgatacgtccagcgcgggttgcgcttgcattgtggtcgctttctttagaagccagttccgccagtttacgctgatgttcttcttccgctgcttggcgatctgctgcaacctgtgcaacctgctcgttatcgtgagcaatacgcgcttccagttcattcagggttttgtcgaaagttgctacgatttcatctacagaacgaattttattaaacagtttcataatttatctcaattggttagttttaatcagtatacatcaatatggttgaaattcaaaatcataaatgtcattcagtgcgcgattccactcggtgtagttttcaccagcaccataacgcatttgaatggcactttcgaacgttgatccgttgaggttcgggaaaccgaacaggtttttgattttgtcatgtgctacataatacagagaagcactttccagcatcgcaaccatcgcagacggctcatgttcgcggcgcttgatacgtaacagagtacgactagcgccagttttacggcgttgatttggtgctacgtagaaacggaatactacgcgccctgttttgtcatcaactaccaggtaaaacccgttttctttcagatccacaccttcgaatttcttgaaggttccgcgtttcatgtcaccaattttaattgcatatttgtgaatgtcaagtcttgtcagaattcttttcatcttttttagataccagtttgcctaattttgtaatttcgcctgtttttacgttaacaaacaaggcgatgctcagaaatgggatgctaatcactacgctgatcaatgtaaacagaaaacgtatcacaaaaagaacagcacgttcaagatatcgttgcatccacgcgattcctaaacaagtataccccactataaaggctgttgcaacataaaatgcaccaaatcctttacgaaatacgtaaccttttccagattcaatctggtcatcggcccacatttcacgggcagttttcagaatagattcaccactcgcgcgggtttcgttagccgaaggcatgtttttaaatttcatgatagtctcctatgcgcccagaactctccaggcgcggttgtttag
